(19) United States
(12) Patent Application Publication
(10) Pub. No.: US 2023/0173060 A1
(43) Pub. Date: Jun. 8, 2023

(54) LARGE SEQUENCE PAN-CORONAVIRUS VACCINE COMPOSITIONS

(71) Applicant: THE REGENTS OF THE UNIVERSITY OF CALIFORNIA, Oakland, CA (US)

(72) Inventor: Lbachir BenMohamed, Irvine, CA (US)

(21) Appl. No.: 18/046,875

(22) Filed: Oct. 14, 2022

Related U.S. Application Data
(63) Continuation-in-part of application No. PCT/US21/27355, filed on Apr. 14, 2021.
(60) Provisional application No. 63/084,421, filed on Sep. 28, 2020.
(60) Provisional application No. 63/009,907, filed on Apr. 14, 2020.
(60) Provisional application No. 63/349,799, filed on Jun. 7, 2022.
(60) Provisional application No. 63/349,904, filed on Jun. 7, 2022.
(60) Provisional application No. 63/302,454, filed on Jan. 24, 2022.

(51) Int. Cl. A61K 39/215; A61K 39/39; A61P 31/14

(52) U.S. Cl. CPC A61K 39/215; A61K 39/39; A61P 31/14; A61K 2039/70

(57) ABSTRACT

Pan-coronavirus vaccines for inducing efficient, powerful and long-lasting protection against all Coronaviruses infections and diseases, comprising multiple highly conserved large sequences which may comprise one or more conserved B, CD4 and CD8 T cell epitopes that help provide multiple targets for the body to develop an immune response for preventing a Coronavirus infection and/or disease. In certain embodiments, the large sequences are conserved proteins or large sequences, e.g., sequences that are highly conserved among human coronaviruses and/or animal coronaviruses (e.g., coronaviruses isolated from animals susceptible to coronavirus infections).

### CROSS-REFERENCES TO RELATED APPLICATIONS

[0001] This application is a continuation in part and claims benefit of PCT Application No. PCT/US20211027355 filed Apr. 14, 2021, which claims benefit of U.S. Provisional Application No. 63/084,421 filed Sep. 28, 2020, and U.S. Provisional Application No. 63/009,907 filed Apr. 14, 2020, the specifications of which are incorporated herein in their entirety by reference.

[0002] This application is a non-provisional and claims benefit of U.S. Provisional Application No. 63/349,799 filed Jun. 7, 2022, U.S. Provisional Application No. 63/349,904 filed Jun. 7, 2022, and U.S. Provisional Application No. 63/302,454 filed Jan. 24, 2022, the specifications of which are incorporated herein in their entirety by reference.

### STATEMENT REGARDING FEDERALLY SPONSORED RESEARCH OR DEVELOPMENT

[0003] This invention was made with government support under Grant No. AI158060, AI150091, AI143348, AI147499, AI143326, AI138764, AI124911 and AI110902 awarded by National institutes of Allergy and infectious Diseases. The government has certain rights in the invention.

### FIELD OF THE INVENTION

[0004] The present invention relates to vaccines, for example viral vaccines, such as those directed to coronaviruses, e.g., pan-coronavirus vaccines.

### BACKGROUND OF THE INVENTION

[0005] Over the last two decades, there have been three deadly human outbreaks of Coronaviruses (CoVs) caused by emerging zoonotic CoVs: SARS-CoV, MERS-CoV, and the latest highly transmissible and deadly SARS-CoV-2, which has caused the current COVID-19 global pandemic. All three deadly CoVs originated from bats, the natural hosts, and transmitted to humans via various intermediate animal reservoirs (e.g., pangolins, civet cats and camels). Because there is currently no universal pan-Coronavirus vaccine available, it remains highly possible that other global COVID-like pandemics will emerge in the coming years, caused by yet another spillover of an unknown zoonotic bat-derived SARS-like Coronavirus (SL-CoV) into an unvaccinated human population.

[0006] Neutralizing antibodies and antiviral effector CD4⁺ and CD8⁺ T cells appear to be crucial in reducing viral load in the majority of infected asymptomatic and convalescent patients. However, very little information exists on the antigenic landscape and the repertoire of B-cell and CD4⁺ and CD8⁺ T cell epitopes that are conserved among human and bat Coronavirus strains.

### SUMMARY OF THE INVENTION

[0007] Current vaccines on the market primarily are directed to the spike antigen only and focus on induction of antibody responses. However, this strategy excludes other more conserved antigens of the virus and misses the opportunity to target long-term cross-reactive memory T cell responses. The present invention aims to create a vaccine that not only includes the spike antigen but also includes other conserved antigens of the virus to induce an immune response with both antibodies and T cells.

[0008] Determining the antigen and epitope landscapes that are antigenic, immunogenic, protective and conserved among human and animal Coronaviruses as well as the repertoire, phenotype and function of B cells and CD4+ and CD8+ T cells that correlate with resistance seen in asymptomatic COVID-19 patients may inform in the development of future pan-Coronavirus vaccines. The present invention describes using several immuno-informatics and sequence alignment approaches and several immunological assays both in vitro in humans and in vivo in animal models (e.g. mice, hamster and monkeys) to identify several antigenic, immunogenic, protective highly conserved large sequences that include human B cell, CD4+ and CD8+ T cell epitopes that are highly conserved, e.g., highly conserved in: (i) greater than 81,000 SARS-CoV-2 human strains identified in 190 countries on six continents: (ii) six circulating CoVs that caused previous human outbreaks of the “Common Cold”; (iii) nine SL-CoVs isolated from bats; (iv) nine SL-CoV isolated from pangolins; (v) three SL-CoVs isolated from civet cats; and (vi) four MERS strains isolated from camels. Furthermore, the present invention describes the identification of cross-reactive epitopes that: recalled B cell, CD4+ and CD8+ T cells from both COVID-19 patients and healthy individuals who were never exposed to SARS-CoV-2; and induced strong B cell and T cell responses in “humanized” Human Leukocyte Antigen (HLA)-DR1/HLA-A*02:01 double transgenic mice as well as in humans that do not express HLA-DR-1 or HLA-A*02:01 haplotypes. Unlike small epitopes that are restricted to certain HLA haplotype, the large sequences encompass several epitopes restricted to large numbers of HLA haplotypes, thus ascertaining large vaccine coverage of human population regardless of HLA haplotypes and regardless of race and ethnicity.

[0009] The present invention is not limited to vaccine compositions for use in humans. The present invention includes vaccine compositions for use in other pet animals such as dogs, cats, etc.

[0010] The vaccine compositions herein have the potential to provide lasting B and T cell immunity regardless of Coronaviruses mutations. This may be due at least partly because the vaccine compositions target highly conserved structural and non-structural Coronavirus antigens, such as Coronavirus nucleoprotein (also known as nucleocapsid), in combination with other Coronavirus structural and non-structural antigens with a low mutation rate found in perhaps every human and animal Coronaviruses variants and strains.

[0011] The present invention is also related to selecting highly conserved structural (e.g., spike protein) and non-structural Coronavirus antigens inside the virus (e.g., non-spike protein such as nucleocapsid), which may be viral proteins that are normally not necessarily under mutation pressure by the immune system.

[0012] The present invention provides pan-Coronavirus recombinant vaccine compositions that induces board, strong and long-lasting B and T cell protective immune responses in humans and pets and animals.

[0013] In certain embodiments, the vaccine compositions are for use in humans. In certain embodiments, the vaccine compositions are for use in animals, such as but not limited to mice, cats, dogs, non-human primates, other animals susceptible to coronavirus infection, other animals that may function as preclinical animal models for coronavirus infections, etc.

[0014] As used herein, the term “multi-epitope” refers to a composition comprising more than one B and T cell epitope wherein at least: one CD4 and/or CD8 T cell epitope is MHC-restricted and recognized by a TCR, and at least one epitope is a B cell epitope. For example, the vaccine compositions herein may be multi-epitope pan-coronavirus vaccine compositions.

[0015] As used herein, the term “recombinant vaccine composition” may refer to one or more proteins or peptides encoded by one or more recombinant genes, e.g. genes that have been cloned into one or more systems that support the expression of said gene(s). The term “recombinant vaccine composition” may refer to the recombinant genes or the system that supports the expression of said recombinant genes.

[0016] For example, the present invention provides a pan-coronavirus recombinant vaccine composition comprising one or more large sequences, wherein each of the one or more large sequences comprise at least one of: one or more conserved coronavirus B-cell target epitopes; one or more conserved coronavirus CD4+ T cell target epitopes; and/or one or more conserved coronavirus CD8+ T cell target epitopes; wherein at least one epitope is derived from a non-spike protein.

[0017] The present invention also features a pan-coronavirus recombinant vaccine composition, the composition comprising two or more large sequences, wherein each of the two or more large sequences comprise at least one of: one or more conserved coronavirus B-cell target epitopes; one or more conserved coronavirus CD4+ T cell target epitopes; and/or one or more conserved coronavirus CD8+ T cell target epitopes; wherein at least one epitope is derived from a non-spike protein.

[0018] The present invention also features a pan-coronavirus recombinant vaccine composition, the composition comprising whole spike protein; and one or both of: one or more conserved coronavirus CD4+ T cell target epitopes; and/or one or more conserved coronavirus CD8+ T cell target epitopes; wherein at least one epitope is derived from a non-spike protein.

[0019] The present invention also features a pan-coronavirus recombinant vaccine composition, the composition comprising at least a portion of spike protein, the portion of spike protein comprising a trimerized SARS-CoV-2 receptor-binding domain (RBD); and one or both of: one or more conserved coronavirus CD4+ T cell target epitopes; one or more conserved coronavirus CD8+ T cell target epitopes; wherein at least one epitope is derived from a non-spike protein.

[0020] The present invention also features a pan-coronavirus recombinant vaccine composition, the composition comprising whole spike protein; and one or more conserved coronavirus CD4+ T cell target epitopes; and one or more conserved coronavirus CD8+ T cell target epitopes; wherein at least one epitope is derived from a non-spike protein.

[0021] The present invention also features a pan-coronavirus recombinant vaccine composition, the composition comprising at least a portion of spike protein, the portion of spike protein comprising a trimerized SARS-CoV-2 receptor-binding domain (RBD); and one or more conserved coronavirus CD4+ T cell target epitopes; and one or more conserved coronavirus CD8+ T cell target epitopes; wherein at least one epitope is derived from a non-spike protein.

[0022] The present invention also features a pan-coronavirus recombinant vaccine composition, the composition comprising an antigen delivery system encoding one or more large sequences, wherein each of the one or more large sequences comprise at least one of: one or more conserved coronavirus B-cell target epitopes; one or more conserved coronavirus CD4+ T cell target epitopes: and/or one or more conserved coronavirus CD8+ T cell target epitopes; wherein at least one epitope is from a non-spike protein.

[0023] The present invention also features a pan-coronavirus recombinant vaccine composition, the composition comprising an antigen delivery system encoding two or more large sequences, wherein each of the two or more large sequences comprise at least one of: one or more conserved coronavirus B-cell target epitopes; one or more conserved coronavirus CD4+ T cell target epitopes; and/or one or more conserved coronavirus CD8+ T cell target epitopes; wherein at least one epitope is derived from a non-spike protein.

[0024] The present invention also features a pan-coronavirus recombinant vaccine composition, the composition comprising an antigen delivery system encoding whole spike protein, and one or both of: one or more conserved coronavirus CD4+ T cell target epitopes; and/or one or more conserved coronavirus CD8+ T cell target epitopes; wherein at least one epitope is derived from a non-spike protein.

[0025] The present invention also features a pan-coronavirus recombinant vaccine composition, the composition comprising an antigen delivery system encoding at least a portion of spike protein, the portion of spike protein comprising a trimerized SARS-CoV-2 receptor-binding domain (RBD); and one or both of: one or more conserved coronavirus CD4+ T cell target epitopes; one or more conserved coronavirus CD8+ T cell target epitopes; wherein at least one epitope is derived from a non-spike protein.

[0026] The present invention also features a pan-coronavirus recombinant vaccine composition, the composition comprising an antigen delivery system encoding whole spike protein; and one or more conserved coronavirus CD4+ T cell target epitopes; and one or more conserved coronavirus CD8+ T cell target epitopes; wherein at least one epitope is derived from a non-spike protein.

[0027] The present invention also features a pan-coronavirus recombinant vaccine composition, the composition comprising an antigen delivery system encoding at least a portion of spike protein, the portion of spike protein comprising a trimerized SARS-CoV-2 receptor-binding domain (RBD); and one or more conserved coronavirus CD4+ T cell target epitopes, and one or more conserved coronavirus CD8+ T cell target epitopes; wherein at least one epitope is derived from a non-spike protein.

[0028] Referring to the aforementioned compositions and the embodiments herein, in some embodiments, the non-spike protein is ORF1ab protein, ORF3a protein, Envelope protein, Membrane glycoprotein, ORF6 protein, ORF7a protein, ORF7b protein, ORF8 protein, Nucleocapsid protein and ORF10 protein.

[0029] In some embodiments, the one or more large sequences are highly conserved among human and animal coronaviruses. In some embodiments, the one or more large sequences are derived from at least one of SARS-CoV-2 protein. In some embodiments, the one or more large sequences are derived from one or more of: one or more SARS-CoV-2 human strains or variants in current circulation; one or more coronaviruses that has caused a previous human outbreak; one or more coronaviruses isolated from animals selected from a group consisting of bats, pangolins, civet cats, minks, camels, and other animal receptive to coronaviruses; or one or more coronaviruses that cause the common cold. In some embodiments, the one or more SARS-CoV-2 human strains or variants in current circulation are selected from: variant B.1.177; variant B.1.160, variant B.1.1.7 (UK), variant P.1 (Japan % Brazil), variant B.1.351 (South Africa), variant B.1.427 (California), variant B.1.429 (California), variant B.1.258; variant 8.1.221; variant B.1.367; variant 8.1.1.277; variant 8.1.1.302; variant B.1.525; variant B.1.526, variant S:677H; variant S:677P; B.1.617.2-Delta, variant B.1.1.529-Omicron (BA.1); sub-variant Omicron (BA.1); sub-variant Omicron (BA.2); sub-variant Omicron (BA.3); sub-variant Omicron (BA.4); sub-variant Omicron (BA.5). In some embodiments, the one or more coronaviruses that cause the common cold are selected from: 229E alpha coronavirus, NL63 alpha coronavirus, OC43 beta coronavirus, and HKU1 beta coronavirus. In some embodiments, the conserved large sequences are selected from Variants Of Concern or Variants Of Interest.

[0030] In some embodiments, the composition comprises two or more large sequences. In some embodiments, the composition comprises three or more large sequences. In some embodiments, the composition comprises two large sequences. In some embodiments, the composition comprises three large sequences. In some embodiments, the composition comprises four large sequences. In some embodiments, the composition comprises five large sequences.

[0031] In some embodiments, the large sequences are derived from structural proteins, non-structural proteins, or a combination thereof. In some embodiments, the large sequences or target epitopes are derived from a SARS-CoV-2 protein selected from a group consisting of: ORF1ab protein, Spike glycoprotein, ORF3a protein, Envelope protein, Membrane glycoprotein, ORF6 protein, ORF7a protein, ORF7b protein, ORF8 protein, Nucleocapsid protein an ORF10 protein.

[0032] In some embodiments, the large sequence or the target epitope derived from the Spike glycoprotein is RBD. In some embodiments, the large sequence or the target epitope derived from the Spike glycoprotein is NTD. In some embodiments, the large sequence or the target epitope derived from the Spike glycoprotein includes both the RBD and NTD regions. In some embodiments, the large sequence or the target epitope derived from the spike glycoprotein are recognized by neutralizing and blocking antibodies.

[0033] In some embodiments, the large sequence or the target epitope derived from the spike glycoprotein induces neutralizing and blocking antibodies. In some embodiments, the large sequence or the target epitope derived from the spike glycoprotein induces neutralizing and blocking antibodies that recognize and neutralize the virus.

[0034] In some embodiments, the large sequence or the target epitope derived from the spike glycoprotein induces neutralizing and blocking antibodies that recognize the spike protein.

[0035] In some embodiments, the ORF1ab protein comprises nonstructural protein (Nsp) 1, Nsp2, Nsp3, Nsp4, Nsp5, Nsp6, Nsp7, Nsp3, Nsp9, Nsp10, Nsp11, Nsp12, Nsp13, Nsp14, Nsp15 and Nsp16. In some embodiments, the one or more conserved coronavirus CD8+ T cell target epitopes are selected from: spike glycoprotein, Envelope protein, ORF1ab protein, ORF7a protein, ORF8a protein, ORF10 protein, or a combination thereof. In some embodiments, the one or more conserved coronavirus CD8+ T cell target epitopes are selected from: S₂₋₁₀, S₁₂₂₅₋₁₂₂₈, S₁₀₀₀₋₁₀₀₈, S₉₅₈₋₉₆₆, E₂₀₋₂₈, ORF1ab₁₆₇₈₋₁₆₈₃, ORF1ab₂₃₆₃₋₂₃₇₁, ORF1ab₃₀₁₃₋₃₀₂₁, ORF1ab₃₁₈₃₋₃₁₉₁, ORF1ab₅₄₇₀₋₅₄₇₈, ORF1ab₆₇₄₉₋₆₇₅₇, ORF7b₂₆₋₃₄, ORF8a₇₃₋₈₁, ORF1₀₃₋₁₁, and ORF1s-13. In some embodiments, the one or more conserved coronavirus CD8+ T cell target epitopes are selected from SEQ ID NO: 2-29 or SEQ ID NO: 194-213. In some embodiments, the one or more conserved coronavirus CD8+ T cell target epitopes are selected from SEQ ID NO: 30-57 or SEQ ID NO: 214-234. In some embodiments, the one or more conserved coronavirus CD4+ T cell target epitopes are selected from: spike glycoprotein, Envelope protein, Membrane protein, Nucleocapsid protein, ORF1a protein, ORF1ab protein, ORF6 protein, ORF7a protein, ORF7b protein, ORF8 protein, or a combination thereof. In some embodiments, the one or more conserved coronavirus CD4-+ T cell target epitopes are selected from: ORF1a₁₃₅₀₋₁₃₆₅, ORF1ab₅₀₁₉₋₅₀₃₃, ORF6₁₂₋₂₈, ORF1ab₆₀₈₈₋₆₁₀₂, ORF1ab₆₄₂₀₋₆₄₃₄, ORF1a₁₈₀₁₋₁₈₁₅, S₁₋₁₃, E₂₆₋₄₀, E₂₀₋₃₄, M₁₇₈₋₁₉₀, N₃₈₈₋₄₀₃, ORF7a₃₋₁₇, ORF7a₁₋₁₅, ORF7b₈₋₂₂, ORF7a₉₈₋₁₁₂, and ORF8₁₋₁₅. In some embodiments, the one or more conserved coronavirus CD4+ T cell target epitopes are selected from SEQ ID NO: 58-73 or SEQ ID NO: 235-253. In some embodiments, the one or more conserved coronavirus CD4+ T cell target epitopes are selected from SEQ ID NO: 74-105 or SEQ ID NO: 254-272. In some embodiments, the one or more conserved coronavirus B cell target epitopes are selected from Spike glycoprotein. In some embodiments, the one or more conserved coronavirus B cell target epitopes are selected from: S₂₈₇₋₃₁₇, S₅₂₄₋₅₉₈, S₆₀₁₋₄₄₀, S₈₀₂₋₈₁₉, S₈₈₃₋₉₀₉, S₃₆₉₋₃₉₃, S₄₄₀₋₅₀₁, S₁₁₃₃₋₁₁₇₂, S₃₂₉₋₃₆₃, and S₁₃₋₃₇. In some embodiments, the one or more coronavirus B cell target epitopes are selected from SEQ ID NO: 106-116 or SEQ ID NO: 273 to 280. In some embodiments, the one or more coronavirus B cell target epitopes are selected from SEQ ID NO: 117-138 or SEQ ID NO: 281-294.

[0036] In some embodiments, the one or more conserved coronavirus B cell target epitopes are in the form of a large sequence. In some embodiments, the large sequence is full length spike glycoprotein. In some embodiments, the large sequence is a partial spike glycoprotein. In some embodiments, the spike glycoprotein has two consecutive proline substitutions at amino acid positions 986 and 987. In some embodiments, the spike glycoprotein has single amino acid substitutions at amino acid positions comprising Tyr-83 and Tyr-489, Gln-24 and Asn-487. In some embodiments, the transmembrane anchor of the spike protein has an intact S1-S2 cleavage site. In some embodiments, the spike protein is in its stabilized conformation. In some embodiments, the spike protein is stabilized with proline substitutions at amino acid positions 986 and 987 at the top of the central helix in the S2 subunit.

[0037] In some embodiments, the one or more large sequences are derived from a whole protein sequence expressed by SARS-CoV-2. In some embodiments, the one or more large sequences are derived from a partial protein sequence expressed by SARS-CoV-2. In some embodiments, the one or more large conserved sequences from the spike protein is from a full-length spike glycoprotein. In some embodiments, the one or more large conserved sequences from the spike protein is from a partial spike glycoprotein. In some embodiments, the one or more large sequences comprises Spike glycoprotein (5) or a portion thereof, Nucleoprotein or a portion thereof, Membrane protein or a portion thereof, and ORF1a/b or a portion thereof. In some embodiments, the one or more large sequences comprises Spike glycoprotein (S) or a portion thereof, Nucleoprotein or a portion thereof, and ORF1a/b or a portion thereof. In some embodiments, the portion of the Spike glycoprotein is RBD. In some embodiments, the one or more large sequences is selected from the group consisting of: ORF1ab protein, Spike glycoprotein, ORF3a protein, Envelope protein, Membrane glycoprotein, ORF6 protein, ORF7a protein, ORF7b protein, ORF8 protein, Nucleocapsid protein an ORF10 protein. In some embodiments, the ORF1ab protein comprises nonstructural protein (Nsp) 1, Nsp2, Nsp3, Nsp4, Nsp5, Nsp6, Nsp7, Nsp8, Nsp9, Nsp10, Nsp11, Nsp12, Nsp13, Nsp14, Nsp15 and Nsp16. In some embodiments, one or more of the large sequences comprises a T-cell epitope restricted to a large number of human class 1 and class 2 HLA haplotypes and are not restricted to HLA-0201 for class 1 or HLA-DR for class 2.

[0038] In some embodiments, the large sequences are derived from structural proteins, non-structural proteins, or a combination thereof.

[0039] The present invention also features a recombinant vaccine composition comprising full-length spike protein. The present invention also features a recombinant vaccine composition comprising full-length spike protein or partial spike protein.

[0040] In some embodiments, the spike protein comprises Tyr-489 and Asn-487. In some embodiments, Tyr-489 and Asn-487 help with interaction with Tyr 83 and Gln-24 on ACE-2. In some embodiments, the spike protein comprises Gln-493. In some embodiments, Gln-493 helps with interaction with Glu-35 and Lys-31 on ACE-2. In some embodiments, the spike protein comprises Tyr-505. In some embodiments, Tyr-505 helps with interaction with Glu-37 and Arg-393 on ACE-2.

[0041] In some embodiments, the composition comprises a trimerized SARS-CoV-2 receptor-binding domain (RBD) sequence. In some embodiments, the trimerized SARS-CoV-2 receptor-binding domain (RBD) sequence is modified by the addition of a T4 fibritin-derived foldon trimerization domain. In some embodiments, the addition of a T4 fibritin-derived foldon trimerization domain increases immunogenicity by multivalent display. In some embodiments, the composition encodes the trimerized SARS-CoV-2 spike glycoprotein RBD antigen together with the one or more highly conserved structural and non-structural SARS-CoV-2 antigens. In some embodiments, the sequence for the antigen is GenBank accession number, MN908947.3. In some embodiments, the conserved large sequences are selected from the Variants Of Concern and Variants Of Interest. In some embodiments, the composition comprises a mutation 682-RRAR-685→682-QQAQ-685 in the S1-S2 cleavage site.

[0042] In some embodiments, the composition comprises at least one proline substitution. In some embodiments, the composition comprises at least two proline substitutions. In some embodiments, the proline substitution is at position K986 and V987. In some embodiments, the composition comprises K986P and V987P mutations.

[0043] In some embodiments, the large sequences are selected from SEQ ID NO. 182-185 (Table 1) or SEQ ID NO: 148-159 or SEQ ID NO: 348-359 (Table 10).

[0044] In some embodiments, the composition further comprises a pharmaceutical carrier. [0044] in some embodiments, the linker comprises T2A. In some embodiments, the linker is selected from T2A, E2A, and P2A. In some embodiments, a different linker is disposed between each open reading frame. [0045] in some embodiments, the vaccine constructs are for humans. In some embodiments, the composition comprises human CXCL-11 and IL-7 or IL-2 or IL-15. In some embodiments, the vaccine constructs are for animals. In some embodiments, the composition comprises animal CXCL-11 and IL-7 or IL-2 or IL-15. In some embodiments, the animals are cats and dogs.

[0045] In some embodiments, the delivery system is an adenovirus system. In some embodiments, the adenovirus delivery system is Ad26, Ad5, Ad35, or a combination thereof. In some embodiments, one or more of the large sequences are operatively linked to a generic promoter. In some embodiments, the generic promoter is a CMV or a CAG promoter. In some embodiments, the one or more large sequences are operatively linked to a lung-specific promoter. In some embodiments, the lung-specific promoter is SpB or CD144. In some embodiments, the composition further comprises a T cell attracting chemokine.

[0046] In some embodiments, the antigen delivery system further encodes a T cell attracting chemokine.

[0047] In some embodiments, the antigen delivery system comprises two delivery systems, wherein a second delivery system encodes the T cell attracting chemokine. In some embodiments, the T cell attracting chemokine is CCL5, CXCL9, CXCL10, CXCL11, or a combination thereof. In some embodiments, the T cell attracting chemokine is operatively linked to a lung-specific promoter. In some embodiments, the T cell attracting chemokine is operatively linked to a generic promoter. In some embodiments, the composition further comprises a composition that promotes T cell proliferation.

[0048] In some embodiments, the antigen delivery system further encodes a composition that promotes T cell proliferation. In some embodiments, the antigen delivery system comprises two delivery systems, wherein a second delivery system encodes the composition that promotes T cell proliferation. In some embodiments, the composition that promotes T cell proliferation is IL-7, IL-2, or IL-15. In some embodiments, the composition that promotes T cell proliferation is operatively linked to a lung-specific promoter. In some embodiments, the composition that promotes T cell proliferation is operatively linked to a generic promoter. In some embodiments, the T cell attracting chemokine and the composition that promotes T cell proliferation are driven by the same promoter. In some embodiments, the vaccine further encodes a peptide comprising a T cell attracting chemokine and a composition that promotes T cell proliferation. In some embodiments, the peptide is operatively linked to a lung-specific promoter. In some embodiments, the peptide is operatively linked to a generic promoter. In some embodiments, the lung-specific promoter is SpB or CD144. In some embodiments, the generic promoter is a CMV or a CAG promoter.

[0049] In some embodiments, the antigen delivery system further encodes a molecular adjuvant. In some embodiments, the antigen delivery system comprises two delivery systems, wherein a second delivery system encodes the molecular adjuvant. In some embodiments, the molecular adjuvant is CpG. In some embodiments, the molecular adjuvant is a CpG polymer. In some embodiments, the molecular adjuvant is flagellin. In some embodiments, the molecular adjuvant is operatively linked to a promoter. In some embodiments, the promoter is a lung-specific promoter or a generic promoter.

[0050] In some embodiments, one or more of the large sequences are separated by a linker. In some embodiments, each of the large sequences are separated by a linker. In some embodiments, the linker is from 2 to 10 amino acids in length.

[0051] In some embodiments, the recombinant vaccine composition comprises a tag, e.g., one or more of the large sequences comprises a tag. In some embodiments, the tag is a His tag.

[0052] The present invention also includes a rVSV-panCoV recombinant vaccine composition comprising any of the vaccine compositions herein.

[0053] The present invention also includes a rAdV-panCoV recombinant vaccine composition comprising any of the vaccine compositions herein.

[0054] In some embodiments, the compositions are for use as a vaccine. In some embodiments, the compositions are for use as immunotherapy for the prevention and treatment of Coronaviruses infections and diseases. In some embodiments, the composition is used to prevent a coronavirus disease in a subject.

[0055] In some embodiments, the composition is used to prevent a coronavirus infection prophylactically in a subject. In some embodiments, the composition elicits an immune response in a subject. In some embodiments, the composition prolongs an immune response induced by the pan-coronavirus recombinant vaccine composition and increases T-cell migration to the lungs.

[0056] The present invention also includes a pan-coronavirus recombinant vaccine composition comprising SEQ ID NO: 139-147 (Table 10).

[0057] Non-spike proteins include any of the coronavirus proteins other than spike, such as but not limited to Envelope protein, Membrane protein, Nucleocapsid protein, ORF1a protein, ORF1ab protein, ORF6 protein, ORF7a protein, ORF7b protein, ORF8 protein, etc.

[0058] In certain embodiments, the compositions of the present invention, e.g., the large sequences, comprise one or more conserved target epitopes, e.g.; one or more conserved coronavirus B-cell target epitopes; one or more conserved coronavirus CD4+ T cell target epitopes; and/or one or more conserved coronavirus CD8+ T cell target epitopes. In some embodiments, a conserved target epitope is one that is one of the 5 most conserved epitopes (for its epitope type, e.g., B cell, CD4 T cell, CD8 T cell) identified in a sequence alignment and analysis. In some embodiments, a conserved target epitope is one that is one of the 10 most conserved epitopes (for its epitope type, e.g., B cell, CD4 T cell, CD8 T cell) identified in a sequence alignment and analysis. In some embodiments, a conserved target epitope is one that is one of the 15 most conserved epitopes (for its epitope type, e.g., B cell. CD4 T cell, CD8 T cell) identified in a sequence alignment and analysis. In some embodiments, a conserved target epitope is one that is one of the 20 most conserved epitopes (for its epitope type, e.g., B cell, CD4 T cell. CD8 T cell) identified in a sequence alignment and analysis. In some embodiments, a conserved target epitope is one that is one of the 25 most conserved epitopes (for its epitope type, e.g., B cell, CD4 T cell, CD8 T cell) identified in a sequence alignment and analysis. In some embodiments, a conserved target epitope is one that is one of the 30 most conserved epitopes (for its epitope type, e.g. B cell, CD4 T cell, CD8 T cell) identified in a sequence alignment and analysis. In some embodiments, a conserved target epitope is one that is one of the 35 most conserved epitopes (for its epitope type, e.g. B cell, CD4 T cell, CD8 T cell) identified in a sequence alignment and analysis. In some embodiments, a conserved target epitope is one that is one of the 40 most conserved epitopes (for its epitope type, e.g., B cell, CD4 T cell, CD8 T cell) identified in a sequence alignment and analysis. In some embodiments, a conserved target epitope is one that is one of the 50 most conserved epitopes (for its epitope type, e.g., B cell, CD4 T cell, CD8 T cell) identified in a sequence alignment and analysis. Examples of sequence alignments and analyses. Are described herein. For example, steps or methods for selecting or identifying conserved large sequences may first include performing a sequence alignment and analysis of a particular number of coronavirus sequences to determine sequence similarity or identity amongst the group of analyzed sequences. In some embodiments, the sequences used for alignments may include human and animal sequences. In certain embodiments, the sequences used for alignments include one or more SARS-CoV-2 human strains or variants in current circulation; one or more coronaviruses that has caused a previous human outbreak; one or more coronaviruses isolated from animals selected from a group consisting of bats, pangolins, civet cats, minks, camels, and other animal receptive to coronaviruses; and/or one or more coronaviruses that cause the common cold. In some embodiments, the conserved large sequences are identified by: performing a sequence alignment and analysis of a particular number of coronavirus sequences to determine sequence similarity or identity amongst the group of analyzed sequences. The conserved large sequences are those that are among the most highly conserved sequences identified in the analysis. For example, the conserved large sequences may be the 2 most highly conserved sequences identified. In some embodiments, the conserved large sequences may be the 5 most highly conserved sequences identified. In some embodiments, the conserved large sequences may be the 8 most highly conserved sequences identified. In some embodiments, the conserved large sequences may be the 10 most highly conserved sequences identified. In some embodiments, the conserved large sequences may be the 15 most highly conserved sequences identified. In some embodiments, the conserved large sequences may be the 20 most highly conserved sequences identified. In some embodiments, the conserved large sequences may be the 30 most highly conserved sequences identified. In some embodiments, the conserved large sequences may be the 40 most highly conserved sequences identified. The present invention is not limited to the aforementioned thresholds. In some embodiments, the alignment and analysis for 50 or more sequences, 100 or more sequences, 200 or more sequences, 300 or more sequences, 400 or more sequences, 500 or more sequences, 1000 or more sequences, 2000 or more sequences, 3000 or more sequences, 4000 or more sequences, 5000 or more sequences, 10,000 or more sequences, 15,000 or more sequences, more than 15,000 sequences, etc., In some embodiments, the sequences used for alignments may include human and animal sequences. In certain embodiments, the sequences used for alignments include one or more SARS-CoV-2 human strains or variants in current circulation; one or more coronaviruses that has caused a previous human outbreak; one or more coronaviruses isolated from animals selected from a group consisting of bats, pangolins, civet cats, minks, camels, and other animal receptive to coronaviruses; and/or one or more coronaviruses that cause the common cold. In some embodiments, the one or more SARS-CoV-2 human strains or variants in current circulation are selected from: variant B.1.177; variant B.1.160, variant B.1.1.7 (UK), variant P.1 (Japan/Brazil), variant B.1.351 (South Africa), variant B.1.427 (California), variant B.1.429 (California), variant B.1.258; variant B.1.221; variant B.1.367; variant B.1.1.277; variant B.1.1.302; variant B.1.525; variant B.1.526, variant S:677H; variant S:677P: B.1.617.2-Delta, variant B.1.1.529-Omicron (BA.1); sub-variant Omicron (BA.1); sub-variant Omicron (BA.2); sub-variant Omicron (BA.3); sub-variant Omicron (BA.4); sub-variant Omicron (BA.5Y As discussed herein, the one or more conserved large sequences comprising target epitopes, are highly conserved among human and animal coronaviruses. For any of the embodiments herein, the epitopes that are selected may be those that achieve a particular score in a binding assay (for binding to an HLA molecule, for example.)

[0059] In certain embodiments, the one or more conserved coronavirus CD8+ T cell target epitopes are selected from: spike glycoprotein, Envelope protein, ORF1ab protein, ORF7a protein, ORF8a protein, ORF10 protein, or a combination thereof. In certain embodiments, the one or more conserved coronavirus CD8+ T cell target epitopes are selected from: S₂₋₁₀, S₁₂₂₀₋₁₂₂₈, S₁₀₀₀₋₁₀₀₈, S₉₅₈₋₉₆₆, E₂₀₋₂₈, ORF1ab₁₆₇₅₋₁₆₈₃, ORF1ab₂₃₆₆₋₂₃₇₁, ORF1ab₃₀₁₃₋₃₀₂₁, ORF1ab₃₁₈₃₋₃₁₉₁, ORF1ab₅₄₇₀₋₅₄₇₈, ORF1ab₆₇₄₉₋₆₇₅₇, ORF7b₂₈₋₃₄, ORF8a₇₃₋₈₁, ORF1₀₃₋₁₁, and ORF1₀₅₋₁₃. In certain embodiments, the one or more conserved coronavirus CD8+ T cell target epitopes are selected from SEQ ID NO: 2-29. In certain embodiments, the one or more conserved coronavirus CD8+ T cell target epitopes are selected from SEQ ID NO: 30-57.

[0060] In certain embodiments, the one or more conserved coronavirus CD4+ T cell target epitopes are selected from: spike glycoprotein, Envelope protein, Membrane protein, Nucleocapsid protein, ORF1a protein, ORF1ab protein, ORF6 protein, ORF7a protein, ORF7b protein, ORF8 protein, or a combination thereof. In certain embodiments, the one or more conserved coronavirus CD4+ T cell target epitopes are selected from: ORF1a₁₃₅₀₋₁₃₈₅, ORF1ab₅₀₁₉₋₅₀₃₃, ORF6₁₂₋₂₈s ORF1ab₆₀₈₈₋₆₁₀₂, ORF1ab₆₄₂₀₋₆₄₃₄, ORF1a₁₈₀₁₋₁₈₁₅, S₁₋₁₃, E₂₆₋₄₀, E₂₀₋₃₄, M₁₇₆₋₁₉₀, N₃₈₈₋₄₀₃, ORF7a₃₋₁₇, ORF7a₁₋₁₅, ORF7b₈₋₂₂, ORF7a₉₈₋₁₁₂, and ORF8₁₋₁₅. In certain embodiments, the one or more conserved coronavirus CD4+ T cell target epitopes are selected from SEQ ID NO: 58-73. In certain embodiments, the one or more conserved coronavirus CD4+ T cell target epitopes are selected from SEQ ID NO: 74-105.

[0061] In certain embodiments, the one or more conserved coronavirus B cell target epitopes are selected from Spike glycoprotein. In certain embodiments, the one or more conserved coronavirus B cell target epitopes are selected from: S₂₈₇₋₃₁₇, S₅₂₄₋₅₉₈, S₆₀₁₋₆₄₀, S₈₀₂₋₈₁₉, S₈₈₈₋₉₀₉, S₃₆₉₋₃₉₃, S₄₄₀₋₅₀₁, S₁₁₃₃₋₁₁₇₂, S₃₂₉₋₃₆₃, and S₁₃₋₃₇. In certain embodiments, the one or more coronavirus B cell target epitopes are selected from SEQ ID NO: 106-116 in certain embodiments, the one or more coronavirus B cell target epitopes are selected from SEQ ID NO: 117-138.

[0062] As previously discussed, in certain embodiments, the one or more conserved coronavirus B cell target epitopes are in the form of a large sequence, e.g., whole spike protein or partial spike protein (e.g., a portion of whole spike protein). In some embodiments, the whole spike protein or portion thereof is in its stabilized conformation. In certain embodiments, the transmembrane anchor of the spike protein (or portion thereof) has an intact S1-S2 cleavage site. In certain embodiments, the spike glycoprotein has two consecutive proline substitutions at amino acid positions 986 and 987, e.g., for stabilization. In certain embodiments, the spike protein or portion thereof has an amino acid substitution at amino acid position Tyr-83. In certain embodiments, the spike protein or portion thereof has an amino acid substitution at amino acid position Tyr-489. In certain embodiments, the spike protein or portion thereof has an amino acid substitution at amino acid position Gln-24. In certain embodiments, the spike protein or portion thereof has an amino acid substitution at amino acid position Asn-487. In certain embodiments, the spike protein or portion thereof has an amino acid substitution at one or more of: Tyr-83, Tyr-489, Gln-24, Gln-493, and Asn-487, e.g., the spike protein or portion thereof may comprise Tyr-489 and Asn-487, the spike protein or portion thereof may comprise Gln-493, the spike protein or portion thereof may comprise Tyr-505, etc. Tyr-489 and Asn-487 may help with interaction with Tyr 83 and Gln-24 on ACE-2. Gln-493 may help with interaction with Glu-35 and Lys-31 on ACE-2. Tyr-505 may help with interaction with Glu-37 and Arg-393 on ACE-2.

[0063] In certain embodiments, the composition comprises a mutation 682-RRAR-685→682-QQAQ-685 in the S1-32 cleavage site. In certain embodiments, the composition comprises at least one proline substitution. In certain embodiments, the composition comprises at least two proline substitutions, e.g., at position K986 and V987.

[0064] In certain embodiments, a large sequence derived from the spike glycoprotein is RBD. In certain embodiments, a large sequence derived from the spike glycoprotein is NTD. In certain embodiments, a large sequence derived from the spike glycoprotein is one or more large sequences, e.g., comprising both the RBD and NTD regions. In certain embodiments, a large sequence derived from the spike glycoprotein is recognized by neutralizing and blocking antibodies. In certain embodiments, a large sequence derived from the spike glycoprotein induces neutralizing and blocking antibodies. In certain embodiments, a large sequence derived from the spike glycoprotein induces neutralizing and blocking antibodies that recognize and neutralize the virus. In certain embodiments, a large sequence derived from the spike glycoprotein induces neutralizing and blocking antibodies that recognize the spike protein.

[0065] In certain embodiments, linkers are used, e.g., between epitopes, between large sequences, etc. In certain embodiments, the linker is from 2-10 amino acids in length. In certain embodiments, the linker is from 3-12 amino acids in length. In certain embodiments, the linker is from 5-15 amino acids in length. In certain embodiments, the linker is 10 or more amino acids in length. Non-limiting examples of linkers include AAY, KK, and GPGPG.

[0066] In some embodiments, the composition comprises the addition of a T4 fibritin-derived foldon trimerization domain. In some embodiments, the addition of a T4 fibritin-derived foldon trimerization domain increases immunogenicity by multivalent display. [0066] in certain embodiments, the composition further comprises a T cell attracting chemokine. For example, the composition may further comprise one or a combination of CCL5, CXCL9, CXCL10, CXCL11, or a combination thereof.

[0067] In certain embodiments, the composition further comprises a composition that promotes T cell proliferation. For example, the composition may further comprise IL-7, IL-15, IL-2, or a combination thereof.

[0068] In certain embodiments, the composition further comprises a molecular adjuvant. For example, the composition may further comprise one or a combination of CpG (e.g., CpG polymer) or flagellin.

[0069] In certain embodiments, the composition comprises a tag. For example, one or more of the large sequences may comprise a tag. In certain embodiments, the epitopes are in the form of two or more antigens, wherein one or more of the antigens comprise a tag. Non-limiting examples of tags include a His tag.

[0070] In certain embodiments, the “antigen delivery system” may refer to two delivery systems, e.g., a portion of the large sequences (or other components such as chemokines, etc.) may be encoded by one delivery system and a portion of the large sequences (or other components) may be encoded by a second delivery system (or a third delivery system, etc.).

[0071] Referring to the antigen delivery system, in certain embodiments the antigen delivery system is a vesicular stomatitis virus (VSV) vector. In certain embodiments, the antigen delivery system is an adenovirus (e.g., Ad26, Ad5, Ad35, etc.)

[0072] The large sequences are operatively linked to a promoter. In certain embodiments, the promoter is a generic promoter (e.g., CMV, CAG, etc.). In certain embodiments, the promoter is a lung-specific promoter (e.g., SpB, CD144). In certain embodiments, large sequences are operatively linked to the same promoter. In certain embodiments, one or more of the large sequences are operatively linked to a first promoter and one or more large sequences are operatively linked to a second promoter. In certain embodiments, the large sequences are operatively linked to two or more promoters, e.g., a portion are operatively linked to a first promoter, a portion are operatively linked to a second promoter, etc. In certain embodiments, the large sequences are operatively linked to three or more promoters, e.g., a portion is operatively linked to a first promoter, a portion is operatively linked to a second promoter, a portion is operatively linked to a third promoter, etc. In certain embodiments, the first promoter is the same as the second promoter. In certain embodiments the second promoter is different from the first promoter. In certain embodiments, the promoter is a generic promoter (e.g., CMV, CAG, etc.). In certain embodiments, the promoter is a lung-specific promoter (e.g., SpB, CD144) promoter.

[0073] In certain embodiments, the antigen delivery system or a separate antigen delivery system encodes a T cell attracting chemokine. In certain embodiments, the antigen delivery system or a separate antigen delivery system encodes a composition that promotes T cell proliferation. In certain embodiments, the antigen delivery system or a separate antigen delivery system encodes both a T cell attracting chemokine and a composition that promotes T cell proliferation. In certain embodiments, the antigen delivery system or a separate antigen delivery system encodes a molecular adjuvant. In certain embodiments, the antigen delivery system or a separate antigen delivery system encodes a T cell attracting chemokine, a composition that promotes T cell proliferation and a molecular adjuvant. In certain embodiments, the antigen delivery system or a separate antigen delivery system encodes a T cell attracting chemokine and a molecular adjuvant. In some embodiments, the antigen delivery system or a separate antigen delivery system encodes a composition that promotes T cell proliferation and a molecular adjuvant.

[0074] In certain embodiments, the T cell attracting chemokine is CCL5, CXCL9, CXCL10, CXCL11, or a combination thereof. In certain embodiments, the composition that promotes T cell proliferation is IL-7 or IL-15 or IL-2. In some embodiments, the molecular adjuvant is CpG (e.g., CpG polymer), flagellin, etc.).

[0075] In certain embodiments, the T cell attracting chemokine is operatively linked to a lung-specific promoter (e.g., SpB, CD144). In certain embodiments, the T cell attracting chemokine is operatively linked to a generic promoter (e.g., CMV, CAG, etc.). In certain embodiments, the composition that promotes T cell proliferation is operatively linked to a lung-specific promoter (e.g., SpB, CD144). In certain embodiments, the composition that promotes T cell proliferation is operatively linked to a generic promoter (e.g., CMV, CAG, etc.). In certain embodiments, the molecular adjuvant is operatively linked to a lung-specific promoter (e.g., SpB, CD144). In certain embodiments, the molecular adjuvant is operatively linked to a generic promoter (e.g., CMV, CAG, etc.). In certain embodiments, the T cell attracting chemokine and the composition that promotes T cell proliferation are driven by the same promoter. In certain embodiments, the T cell attracting chemokine and the composition that promotes T cell proliferation are driven by different promoters. In certain embodiments, the molecular adjuvant, the T cell attracting chemokine, and the composition that promotes T cell proliferation are driven by the same promoter. In certain embodiments, the molecular adjuvant, the T cell attracting chemokine, and the composition that promotes T cell proliferation are driven by different promoters. In certain embodiments, the molecular adjuvant and the composition that promotes T cell proliferation are driven by different promoters. In certain embodiments, the molecular adjuvant and the T cell attracting chemokine are driven by different promoters.

[0076] In certain embodiments, the T cell attracting chemokine and the composition promoting T cell proliferation are separated by a linker, in certain embodiments, the linker comprises T2A. In certain embodiments, the linker comprises E2A. In certain embodiments, the linker comprises P2A. In certain embodiments, the linker is selected from T2A, E2A, and P2A.

[0077] Referring to the antigen delivery system, in certain embodiments, a linker is disposed between each open reading frame. In certain embodiments, a different linker is disposed between each open reading frame. In certain embodiments, the same linker may be used between particular open reading frames and a different linker may be used between other open reading frames.

[0078] In some embodiments, the vaccine composition is administered using an adenovirus.

[0079] The composition herein may be used to prevent a coronavirus disease in a subject. The composition herein may be used to prevent a coronavirus infection prophylactically in a subject. The composition herein may be used to elicit an immune response in a subject. The term “subject” herein may refer to a human, a non-human primate, an animal such as a mouse, rat, cat, dog, other animal that is susceptible to coronavirus infection, or other animal used for preclinical modeling. The composition herein may prolong an immune response induced by the pan-coronavirus recombinant vaccine composition and increases T-cell migration to the lungs. In certain embodiments, the composition induces resident memory T cells (Trm). In some embodiments, the vaccine composition induces efficient and powerful protection against the coronavirus disease or infection. In some embodiments, the vaccine composition induces production of antibodies (Abs), CD4+ T helper (Th1) cells, and CD8+ cytotoxic T-cells (CTL). In some embodiments, the composition that promotes T cell proliferation helps to promote long term immunity. In some embodiments, the T-cell attracting chemokine helps pull T-cells from circulation into the lungs.

[0080] In certain embodiments, the composition further comprises a pharmaceutical carrier.

[0081] The present invention includes any of the vaccine compositions described herein, e.g., the aforementioned vaccine compositions for delivery with nanoparticles, e.g., lipid nanoparticles. For example, the present invention includes the vaccine compositions herein encapsulated in a lipid nanoparticle.

[0082] The present invention includes the compositions described herein comprising and/or encoding a trimerized SARS-CoV-2 receptor-binding domain (RBD) and one or more highly conserved SARS-CoV-2 sequences selected from structural proteins (e.g., nucleoprotein, etc.) and non-structural protein (e.g., Nsp4, etc.). In some embodiments, the trimerized SARS-CoV-2 receptor-binding domain (RBD) sequence is modified by the addition of a T4 fibritin-derived foldon trimerization domain. In some embodiments, the addition of a T4 fibritin-derived foldon trimerization domain increases immunogenicity by multivalent display.

[0083] The present invention also features methods of producing a pan-coronavirus recombinant vaccine compositions of the present invention.

[0084] For example, in some embodiments, the method comprises selecting at least conserved large sequences comprising: one or more coronavirus B-cell epitopes; one or more coronavirus CD4+ T cell epitopes; one or more coronavirus CD8+ T cell epitopes. In other embodiments, the method comprises selecting at least two conserved large sequences comprising: one or more coronavirus B-cell epitopes; one or more coronavirus CD4-+ T cell epitopes; one or more coronavirus CD8+ T cell epitopes. At least one large sequence is derived from a non-spike protein. The method further comprises synthesizing an antigen or antigens comprising the selected large sequences. In some embodiments, the method comprises selecting: one or more conserved large sequences comprising one or more coronavirus B-cell epitopes; one or more coronavirus CD4+ T cell epitopes; and one or more coronavirus CD8+ T cell epitopes. At least one large sequence is derived from a non-spike protein. The method further comprises synthesizing an antigen or antigens comprising the selected large sequences. In some embodiments, the method further comprises introducing the vaccine composition to a pharmaceutical carrier. The steps for selecting the one or more conserved large sequences are disclosed herein. Methods for synthesizing recombinant proteins are well known to one of ordinary skill in the art. The vaccine compositions are disclosed herein. In some embodiments, the vaccine composition is in the form of DNA, RNA, modified RNA, protein (or peptide), or a combination thereof.

[0085] In some embodiments, the method comprises selecting: at least one conserved large sequence comprising: one or more coronavirus B-cell epitopes; one or more coronavirus CD4+ T cell epitopes; and one or more coronavirus CD8+ T cell epitopes. At least one large sequence is derived from a non-spike protein. The method further comprises synthesizing an antigen delivery system encoding the selected large sequences. In some embodiments, the method further comprises introducing the vaccine composition to a pharmaceutical carrier. The steps for selecting the one or more conserved large sequences are disclosed herein. Methods for synthesizing antigen delivery systems are well known to one of ordinary skill in the art. The vaccine compositions are disclosed herein. In some embodiments, the vaccine composition is in the form of DNA, RNA, modified RNA, protein (or peptide), or a combination thereof.

[0086] As an example, steps or methods for selecting or identifying conserved large sequences may first include performing a sequence alignment and analysis of a particular number of coronavirus sequences, e.g., 50 or more sequences, 100 or more sequences, 200 or more sequences, 300 or more sequences, 400 or more sequences, 500 or more sequences, 1000 or more sequences, 2000 or more sequences, 3000 or more sequences, 4000 or more sequences, 5000 or more sequences, 10,000 or more sequences, 15,000 or more sequences, more than 15,000 sequences, etc., to determine sequence similarity or identity amongst the group of analyzed sequences. In some embodiments, the sequences used for alignments may include human and animal sequences. In certain embodiments, the sequences used for alignments include one or more SARS-CoV-2 human strains or variants in current circulation; one or more coronaviruses that has caused a previous human outbreak; one or more coronaviruses isolated from animals selected from a group consisting of bats, pangolins, civet cats, minks, camels, and other animal receptive to coronaviruses; and/or one or more coronaviruses that cause the common cold. In some embodiments, the one or more SARS-CoV-2 human strains or variants in current circulation are selected from: variant B.1.177; variant B.1.160, variant B.1.1.7 (UK), variant P.1 (Japan/Brazil), variant 8.1.351 (South Africa), variant B.1.427 (California), variant B.1.429 (California), variant B.1.258; variant B.1.221; variant B.1.367; variant B.1.1.277; variant B.1.1.302; variant B.1.525; variant B.1.526, variant S:677H; variant S:677P; B.1.617.2-Delta, variant B.1.1.529-Omicron (BA.1); sub-variant Omicron (BA.1); sub-variant Omicron (BA.2); sub-variant Omicron (BA.3); sub-variant Omicron (BA.4); sub-variant Omicron (BA.5). In some embodiments, the one or more coronaviruses that cause the common cold are selected from: 229E alpha coronavirus, NL63 alpha coronavirus, OC43 beta coronavirus, and HKU1 beta coronavirus. In some embodiments, the conserved large sequences may be considered the 2 most highly conserved sequences of the identified large sequences in the alignment. In some embodiments, the conserved large sequences may be considered the 5 most highly conserved sequences of the identified large sequences in the alignment. In some embodiments, the conserved large sequences may be considered the 10 most highly conserved sequences of the identified large sequences in the alignment. In some embodiments, the conserved large sequences may be considered the 15 most highly conserved sequences of the identified large sequences in the alignment.

[0087] The present invention also features methods for preventing coronavirus disease. The method comprises administering to a subject a therapeutically effective amount of a pan-coronavirus recombinant vaccine composition according to the present invention, wherein the composition elicits an immune response in the subject and helps prevent coronavirus disease.

[0088] The present invention also features methods for preventing a coronavirus infection prophylactically in a subject. In some embodiments, the method comprises administering to the subject a prophylactically effective amount of a pan-coronavirus recombinant vaccine composition according to the present invention, wherein the vaccine composition prevents coronavirus infection.

[0089] The present invention also features methods for eliciting an immune response in a subject, comprising administering to the subject a composition according to the present invention, wherein the vaccine composition elicits an immune response in the subject. The present invention also features methods comprising: administering to a subject a pan-coronavirus recombinant vaccine composition according to the present invention, wherein the composition prevents virus replication in the lungs, the brain, and other compartments where the virus replicates. The present invention also features methods comprising: administering to the subject a pan-coronavirus recombinant vaccine composition according to the present invention, wherein the composition prevents cytokine storm in the lungs, the brain, and other compartments where the virus replicates. The present invention also features methods comprising: administering to the subject a pan-coronavirus recombinant vaccine composition according to the present invention, wherein the composition prevents inflammation or inflammatory response in the lungs, the brain, and other compartments where the virus replicates. The present invention also features methods comprising: administering to the subject a pan-coronavirus recombinant vaccine composition according to the present invention, wherein the composition improves homing and retention of T cells in the lungs, the brain, and other compartments where the virus replicates. The present invention also features methods for preventing coronavirus disease in a subject; the method comprising: administering to the subject a pan-coronavirus recombinant vaccine composition according to the present invention, wherein the composition induces memory B and T cells. The present invention also features methods for prolonging an immune response induced by a pan-coronavirus recombinant vaccine and increasing T-cell migration to the lungs, the method comprising: co-expressing a T-cell attracting chemokine, a composition that promotes T cell proliferation, and a pan-coronavirus recombinant vaccine according to the present invention. The present invention also features methods for prolonging the retention of memory T-cell into the lungs induced by a pan coronavirus vaccine and increasing virus-specific tissue resident memory T-cells (TRM cells), the method comprising: co-expressing a T-cell attracting chemokine, a composition that promotes T cell proliferation, and a pan-coronavirus recombinant vaccine according to the present invention. The present invention also features methods comprising: administering to the subject a pan-coronavirus recombinant vaccine composition according to the present invention, wherein the composition prevents the development of mutation and variants of a coronavirus.

[0090] For the sake of brevity, it is noted that the vaccine compositions referred to in the aforementioned methods include the vaccine compositions previously discussed, the embodiments described below, and the embodiments in the figures.

[0091] In some embodiments, the vaccine composition is administered through an intravenous route (i.v.), an intranasal route (i.n.), or a sublingual route (s.l.) route.

[0092] In some embodiments, the vaccine composition is administered using an adenovirus or other appropriate delivery system.

[0093] As previously discussed, the composition herein may be used to prevent a coronavirus disease in a subject. The composition herein may be used to prevent a coronavirus infection prophylactically in a subject. The composition herein may be used to elicit an immune response in a subject. The term “subject” herein may refer to a human, a non-human primate, an animal such as a mouse, rat, cat, dog, other animal that is susceptible to coronavirus infection, or other animal used for preclinical modeling. The composition herein may prolong an immune response induced by the pan-coronavirus recombinant vaccine composition and increases T-cell migration to the lungs. In certain embodiments, the composition induces resident memory T cells (Trm). In some embodiments, the vaccine composition induces efficient and powerful protection against the coronavirus disease or infection. In some embodiments, the vaccine composition induces production of antibodies (Abs), CD4+ T helper (Th1) cells, and CD8+ cytotoxic T-cells (CTL). In some embodiments, the composition that promotes T cell proliferation helps to promote long term immunity. In some embodiments, the T-cell attracting chemokine helps pull T-cells from circulation into the lungs.

[0094] The present invention also features oligonucleotide compositions. For example, the present invention includes oligonucleotides disclosed in the sequence listings. The present invention also includes oligonucleotides in the form of antigen delivery systems. The present invention also includes oligonucleotides encoding the conserved large sequences disclosed herein. The present invention also includes oligonucleotide compositions comprising one or more oligonucleotides encoding any of the vaccine compositions according to the present invention. In some embodiments, the oligonucleotide comprises DNA. In some embodiments, the oligonucleotide comprises modified DNA. In some embodiments, the oligonucleotide comprises RNA. In some embodiments, the oligonucleotide comprises modified RNA. In some embodiments, the oligonucleotide comprises mRNA. In some embodiments, the oligonucleotide comprises modified mRNA.

[0095] The present invention also features peptide compositions. For example, the present invention includes peptides disclosed in the sequence listings. The present invention also includes peptide compositions comprising any of the vaccine compositions according to the present invention. The present invention also includes peptide compositions comprising any of the conserved large sequences according to the present invention.

[0096] For the sake of brevity, it is noted that the vaccine compositions referred to in the aforementioned oligonucleotide and peptide compositions include the vaccine compositions previously discussed, the embodiments described below, and the embodiments in the figures.

[0097] The present invention also features a pan-coronavirus recombinant vaccine composition comprising SEQ ID NO 139-147 (Table 9). The present invention also features a pan-coronavirus recombinant vaccine composition at least 99% identical to SEQ ID NO: 139-147 (Table 9).

[0098] The present invention also features a method comprising: administering a first pan-coronavirus recombinant vaccine dose using a first delivery system, and administering a second vaccine dose using a second delivery system, wherein the first and second delivery system are different. In some embodiments, the first delivery system may comprise a RNA, a modified mRNA, or a peptide delivery system. In some embodiments, the second delivery system may comprise a RNA, a modified mRNA, or a peptide delivery system. In some embodiments, the peptide delivery system is an adenovirus. In some embodiments, the adenovirus delivery system is Ad26, Ad5, Ad35, or a combination thereof. In some embodiments, the peptide delivery system is a vesicular stomatitis virus (VSV) vector. In some embodiments, the second vaccine dose is administered 14 days after the first vaccine dose.

[0099] The present invention also features a method comprising: administering a pan-coronavirus recombinant vaccine composition according to the present invention: and administering at least one T-cell attracting chemokine after administering the pan-coronavirus recombinant vaccine composition. In some embodiments, the vaccine composition is administered via a RNA, a modified mRNA, or a peptide delivery system. In some embodiments, the T-cell attracting chemokine is administered via a RNA, a modified mRNA, or a peptide delivery system. In some embodiments, the peptide delivery system is an adenovirus.

[0100] In some embodiments, the adenovirus delivery system is Ad26, Ad5, Ad35, or a combination thereof. In some embodiments, the peptide delivery system is a vesicular stomatitis virus (VSV) vector. In some embodiments, the T-cell attracting chemokine is administered 8 days after administering days after the vaccine composition. In some embodiments, the T-cell attracting chemokine is administered 14 days after administering days after the vaccine composition. In some embodiments, the T-cell attracting chemokine is administered 30 days after administering days after the vaccine composition. In some embodiments, the T-cell attracting chemokine is CCL5, CXCL9, CXCL10, CXCL11, or a combination thereof.

[0101] The present invention also features a method comprising: administering a pan-coronavirus recombinant vaccine composition according to the present invention; administering at least one T-cell attracting chemokine after administering the pan-coronavirus recombinant vaccine composition; and administering at least one cytokine after administering the T-cell attracting chemokine. In some embodiments, the vaccine composition is administered via a RNA, a modified mRNA, or a peptide delivery system. In some embodiments, the T-cell attracting chemokine is administered via a RNA, a modified mRNA, or a peptide delivery system. In some embodiments, the cytokine is administered via a RNA, a modified mRNA, or a peptide delivery system. In some embodiments, the peptide delivery system is an adenovirus. In some embodiments, the adenovirus delivery system is Ad26, Ad5, Ad35, or a combination thereof. In some embodiments, the peptide delivery system is a vesicular stomatitis virus (VSV) vector. In some embodiments, the T-cell attracting chemokine is administered 14 days after administering the vaccine composition. In some embodiments, the T-cell attracting chemokine is CCL5, CXCL9, CXCL10, CXCL11, or a combination thereof. In some embodiments, the cytokine is administered 10 days after administering the T-cell attracting chemokine. In some embodiments, the cytokine is IL-7, IL-15, IL2 or a combination thereof.

[0102] The present invention also features a method comprising: administering a pan-coronavirus recombinant vaccine composition according to the present invention; administering one or more T-cell attracting chemokine after administering the pan-coronavirus recombinant vaccine composition; and administering one or more mucosal chemokine(s). In some embodiments, the vaccine composition is administered using an adenovirus. In some embodiments, the T-cell attracting chemokine is administered via a RNA, a modified mRNA, or a peptide delivery system, or other delivery system. In some embodiments, the mucosal chemokine is administered via a RNA, a modified mRNA, or a peptide delivery system, or other delivery system. In some embodiments, the adenovirus is Ad26, Ad5, Ad35, or a combination thereof. In some embodiments, the T-cell attracting chemokine is administered 14 days after administering the vaccine composition. In some embodiments, the T-cell attracting chemokine is CCL5, CXCL9, CXCL10, CXCL11, or a combination thereof. In some embodiments, the mucosal chemokine is administered 10 days after administering the T-cell attracting chemokine. In some embodiments, the mucosal chemokine is CCL25, CCL28, CXCL14, or CXCL17, or a combination thereof.

[0103] For the sake of brevity, it is noted that the vaccine compositions referred to in the aforementioned methods include the vaccine compositions previously discussed, the embodiments described below, and the embodiments in the figures.

[0104] As previously discussed, in some embodiments, the vaccine compositions are for use in humans. In some embodiments, the vaccine compositions are for use in animals, e.g., cats, dogs, etc. In some embodiments, the vaccine composition comprises human CXCL-11 and/or human IL-7 (or IL-15, IL-2). In some embodiments, the vaccine composition comprises animal CLCL-11 and/or animal IL-7 (or IL-15, IL-2).

[0105] The present invention includes vaccine compositions in the form of a rVSV-panCoV vaccine composition. The present invention includes vaccine compositions in the form of a rAdV-panCoV vaccine composition.

[0106] The present invention also includes nucleic acids for use in the vaccine compositions herein. The present invention also includes vectors for use in the vaccine compositions herein. The present invention also includes fusion proteins for use in the vaccine compositions herein. The present invention also includes immunogenic compositions for use in the vaccine compositions herein.

[0107] The vaccine compositions herein may be designed to elicit both high levels of virus-blocking and virus-neutralizing antibodies as well as CD4+ T cells and CD8+ T cells in adults 18 to 55 years. The vaccine compositions herein may be designed to elicit both high levels of virus-blocking and virus-neutralizing antibodies as well as CD4+ T cells and CD8+ T cells in adults 55 to 65 years of age. The vaccine compositions herein may be designed to elicit both high levels of virus-blocking and virus-neutralizing antibodies as well as CD4+ T cells and CD8+ T cells in adults 65 to 85 years of age. The vaccine compositions herein may be designed to elicit both high levels of virus-blocking and virus-neutralizing antibodies as well as CD4+ T cells and CD8+ T cells in adults 85 to 100 years of age. The vaccine compositions herein may be designed to elicit both high levels of virus-blocking and virus-neutralizing antibodies as well as CD4+ T cells and CD8+ T cells in children 12 to 18 years of age. The vaccine compositions herein may be designed to elicit both high levels of virus-blocking and virus-neutralizing antibodies as well as CD4+ T cells and CD8+ T cells in children under 12 years of age.

[0108] The present invention is not limited to vaccine compositions. For example, in certain embodiments, one or more of the conserved large sequences are used for detecting coronavirus and/or diagnosing coronavirus infection.

[0109] As previously discussed, in some embodiments, the one or more conserved large sequences are highly conserved among human and animal coronaviruses. In some embodiments, the conserved large sequence is one that is among the most highly conserved large sequences identified in a sequence alignment and analysis of a particular number of coronavirus sequences. For example, the conserved large sequence may be the 2 most highly conserved large sequences identified. In some embodiments, the conserved large sequences may be the 5 most highly conserved large sequences identified. In some embodiments, the conserved large sequences may be the 8 most highly conserved large sequences identified. In some embodiments, the conserved large sequences may be the 10 most highly conserved large sequences identified. In some embodiments, the conserved large sequences may be the 15 most highly conserved large sequences identified. In some embodiments, the conserved large sequences may be the 20 most highly conserved large sequences identified. In some embodiments, the conserved large sequences may be the 30 most highly conserved large sequences identified. In some embodiments, the conserved large sequences may be the 40 most highly conserved large sequences identified. In some embodiments, the one or more conserved. In some embodiments, the conserved large sequences may be the 5 most highly conserved large sequences identified are derived from at least one of SARS-CoV-2 protein. In some embodiments, the one or more conserved In some embodiments, the conserved large sequences may be the 5 most highly conserved large sequences identified are derived from one or more of: one or more SARS-CoV-2 human strains or variants in current circulation; one or more coronaviruses that has caused a previous human outbreak; one or more coronaviruses isolated from animals selected from a group consisting of bats, pangolins, civet cats, minks, camels, and other animal receptive to coronaviruses; or one or more coronaviruses that cause the common cold. In some embodiments, the one or more SARS-CoV-2 human strains or variants in current circulation are selected from variant B.1.177; variant B.1.160, variant B.1.1.7 (UK), variant P.1 (Japan/Brazil), variant B.1.351 (South Africa), variant B.1.427 (California), variant B.1.429 (California), variant B.1.258; variant B.1.221; variant 8.1.367; variant 8.1.1.277; variant B.1.1.302; variant B.1.525; variant B1.526, variant S:677H; variant S:677P; B.1.617.2-Delta, variant B.1.1.529-Omicron (BA.1); sub-variant Omicron (BA.1); sub-variant Omicron (BA.2); sub-variant Omicron (BA.3); sub-variant Omicron (BA.4); sub-variant Omicron (BA.5). In some embodiments, the one or more coronaviruses that cause the common cold are selected from: 229E alpha coronavirus, NL63 alpha coronavirus, OC43 beta coronavirus, and HKU1 beta coronavirus. In some embodiments, the vaccine composition is for humans. In some embodiments, the vaccine composition is for animals.

[0110] The present invention also features a method of producing a pan-coronavirus composition, the method comprising selecting at least one large sequence(s) according to the present invention and synthesizing one or more antigens comprising the selected large sequence(s). The present invention also features a method of producing a pan-coronavirus composition, the method comprising selecting at least one conserved large sequence(s); and synthesizing an antigen delivery system that encodes the selected large sequence(s).

[0111] The present invention also includes a pan-coronavirus recombinant vaccine composition, the composition comprising one or more large sequences, each of the one or more large sequences comprises at least one of: whole spike protein or a portion thereof; one or more conserved coronavirus CD4+ T cell target epitope; and one or more conserved coronavirus CD8+ T cell target epitope; wherein at least one epitope is derived from a non-spike protein.

[0112] In some embodiments, the one or more conserved epitopes are highly conserved among human and animal coronaviruses. In some embodiments, the one or more conserved epitopes are derived from at least one of SARS-CoV-2 protein. In some embodiments, the composition comprises 2-20 CD8+ T cell target epitopes. In some embodiments, the composition comprises 2-20 CD4+ T cell target epitopes. In some embodiments, the one or more conserved coronavirus CD4+ T cell target epitopes selected from SEQ ID NO: 58-105 (ORF1a1350-1365, ORF1ab5019-5033, ORF612-26, ORF1ab6088-6102, ORF1ab6420-6434, ORF1a1801-1815, S1-13, E26-40, E20-34, M176-190, N388-403, ORF7a3-17, ORF7a1-15, ORF7b8-22, ORF7a98-112, and ORF81-15.). In some embodiments, the one or more conserved coronavirus CD8+ T cell target epitopes selected from SEQ ID NO: 106-138 (S287-317, S524-598, S601-640, S802-819, S888-909, S369-393, S440-501, S1133-1172, S329-363, and S13-37).

[0113] The present invention also features a pan-coronavirus recombinant vaccine composition, the composition comprising one or more large sequences, each of the one or more large sequences comprises at least one of: one or more conserved coronavirus B-cell target epitope; one or more conserved coronavirus CD4+ T cell target epitope; and/or one or more conserved coronavirus CD8+ T cell target epitope, wherein at least one epitope is derived from a non-spike protein.

[0114] In some embodiments, the one or more conserved epitopes are derived from at least one of SARS-CoV-2 proteins. In some embodiments, the composition comprises 2-20 CD8+ T cell target epitopes.

[0115] In some embodiments, the composition comprises 2-20 CD4+ T cell target epitopes. In some embodiments, the one or more conserved coronavirus CD4+ T cell target epitopes selected from SEQ ID NO 58-105 (ORF1a1350-1365, ORF1ab5019-5033, ORF612-26, ORF1ab6088-6102, ORF1ab6420-6434, ORF1a1801-1815, S1-13, E26-40, E20-34, M176-190, N388-403, ORF7a3-17, ORF7a1-15, ORF7b8-22, ORF7a98-112, and ORF81-15.).

[0116] In some embodiments, the one or more conserved coronavirus CD8+ T cell target epitopes selected from SEQ ID NO: 106-138 (S287-317, 3524-598, S601-640, S802-819, 3888-909, S369-393, S440-501, S1133-1172, S329-363, and S13-37).

[0117] In some embodiments, the one or more conserved coronavirus B-cell target epitopes selected from SEQ ID NO: 2-57 (S2-10, S1220-1228, S1000-1008, S958-966, E20-28, ORF1ab1675-1683, ORF1ab2363-2371, ORF1ab3013-3021, ORF1ab3183-3191, ORF1ab5470-5478, ORF1ab6749-6757, ORF7b26-34, ORF8a73-81, ORF103-11, and ORF105-13);

[0118] The present invention also features a pan-coronavirus recombinant vaccine composition, the composition comprising an antigen delivery system encoding one or more large sequences, the large sequences comprise at least one of: one or more conserved coronavirus B-cell target epitopes; one or more conserved coronavirus CD4+ T cell target epitopes; and/or one or more conserved coronavirus CD8+ T cell target epitopes; wherein at least one epitope is derived from a non-spike protein.

[0119] In some embodiments, the antigen delivery system is an adenovirus-based antigen delivery system. In some embodiments, the adenovirus-based antigen delivery system is Ad26, Ad5, Ad35, or a combination thereof. In some embodiments, the antigen delivery system further encodes a T cell attracting chemokine. In some embodiments, the antigen delivery system further encodes a composition that promotes T cell proliferation. In some embodiments, the antigen delivery system further encodes a molecular adjuvant. In some embodiments, the large sequences are operatively linked to a lung-specific promoter.

[0120] In some embodiments, the one or more conserved coronavirus B-cell target epitopes selected from SEQ ID NO: 2-57 (S2-10, S1220-1228, S1000-1008, S958-966, E20-28, ORF1ab1675-1683, ORF1ab2363-2371, ORF1ab3013-3021, ORF1ab3183-3191, ORF1ab5470-5478, ORF1ab6749-6757, ORF7b26-34, ORF8a73-81, ORF103-11, and ORF105-13). In some embodiments, the one or more conserved coronavirus CD4+ T cell target epitopes selected from SEQ ID NO: 58-105 (ORF1a1350-1365, ORF1ab5019-5033, ORF612-26, ORF1ab6088-6102. ORF1ab6420-6434, ORF1a1801-1815, S1-13, E26-40, E20-34, M176-190, N388-403, ORF7a3-17, ORF7a1-15, ORF7b8-22, ORF7a98-112, and ORF81-15.). In some embodiments, the one or more conserved coronavirus CD8+ T cell target epitopes selected from SEQ ID NO: 106-138 (S287-317, S524-598, S601-640, S802-819, 3888-909, S369-393, S440-501, S1133-1172, S329-363, and S13-37).

[0121] In some embodiments, the partial spike protein comprises a trimerized SARS-CoV-2 receptor-binding domain (RBD). In some embodiments, the whole spike protein or partial spike protein has an intact S1-S2 cleavage site. In some embodiments, the spike protein is stabilized with proline substitutions at amino acid positions 986 and 987.

[0122] The present invention also features a pan-coronavirus recombinant vaccine composition comprising one of SEQ ID NO: 139-147.

[0123] The present invention also includes the corresponding nucleic acid sequences for any of the protein sequences herein. The present invention also includes the corresponding protein sequences for any of the nucleic acid sequences herein.

[0124] Embodiments herein may comprise whole spike protein or a portion of spike protein. Whole spike protein and a portion thereof is not limited to a wild type or original sequence and may include spike protein or a portion thereof with one or more modifications and/or mutations, such as point mutations, deletions, etc.; including the mutations described herein such as those for improving stability.

[0125] Embodiments of the present invention can be freely combined with each other if they are not mutually exclusive.

[0126] Any feature or combination of features described herein are included within the scope of the present invention provided that the features included in any such combination are not mutually inconsistent as will be apparent from the context, this specification, and the knowledge of one of ordinary skill in the art.

[0127] Additional advantages and aspects of the present invention are apparent in the following detailed description and claims.

### DESCRIPTION OF THE SEVERAL VIEWS OF THE DRAWING(S)

[0128] The features and advantages of the present invention will become apparent from a consideration of the following detailed description presented in connection with the accompanying drawings in which:

[0129] FIG. 1 shows a schematic view of an example of a large sequence pan-coronavirus recombinant vaccine composition. Each large sequence in the recombinant vaccine composition may comprise epitopes. CD8+ T cell epitopes are shown with a square, CD4+ T cell epitopes are shown with a circle and B-cell epitopes are shown with a diamond. Each shape (square, circle, or diamond) may represent a variety of different epitopes and is not limited to a singular epitope. The multi-epitope pan-coronavirus vaccines are not limited to a specific combination of large sequences as shown. The large sequence pan-coronavirus vaccines may comprise a various number of large sequences.

[0130] FIG. 2A shows an evolutionary comparison of genome sequences among beta-Coronavirus strains isolated from humans and animals. A phylogenetic analysis performed between SARS-CoV-2 strain sp (obtained from humans (Homo Sapiens (black)), along with the animal's SARS-like Coronaviruses genome sequence (SL-CoVs) sequences obtained from bats (Rhinolophus affinis, Rhinolophus malayanus (red)), pangolins (Manis javanica (blue)), civet cats (Paguma larvata (green)), and camels (Camelus dromedaries (Brown)). The included SARS-CoV/MERS-CoV strains are from previous outbreaks (obtained from humans (Urbani, MERS-CoV, OC43, NL63, 229E, HKU1-genotype-B), bats (WIV16, WIV1, YNLF-31C, Rs672, recombinant strains), camel (Camelus dromedaries, (KT368891.1, MN514967.1, KF917527.1, NC_028752.1), and civet (Civet007, A022, B039)). The human SARS-CoV-2 genome sequences are represented from six continents.

[0131] FIG. 28 shows an evolutionary analysis performed among the human-SARS-CoV-2 genome sequences reported from six continents and SARS-CoV-2 genome sequences obtained from bats (Rhinolophus affinis, Rhinolophus malayanus), and pangolins (Manis javanica)).

[0132] FIG. 3A shows lungs, heart, kidneys, intestines, brain, and testicles express ACE2 receptors and are targeted by SARS-CoV-2 virus. SARS-CoV-2 virus docks on the Angiotensin converting enzyme 2 (ACE2) receptor via spike surface protein.

[0133] FIG. 3B shows a System Biology Analysis approach utilized in the present invention.

[0134] FIG. 4 shows sequence homology analysis for SARS-CoV-2, common cold CoV strains, MERS, SARS-CoV-Urbani and animal CoVs with SARS-CoV-2 Wuhan Strain (Query strain; hCoV-19batYN01). Five fragments SARS-CoV-2 genome were found to be highly conserved (1 bp-1580 bp (fragment 1), 3547 bp-12830 bp (fragment 2), 17472 bp-21156 bp (fragment 3), 22584 bp-24682 bp (fragment 4), and 26193 bp-27421 bp (fragment 5).

[0135] FIG. 5 shows sequence homology analysis for fragment 1 (1 bp-1580 bp) which comprises portions of ORF1a/b. The Query sequence (1-1580 bp hCoV-19/batYN1) was BLAST against all the SARS-CoV-2 VOCs, human CoV strains, CoV strains from bats, pangolin, civet cat. 28 variants/strains were found with significant homology for this queried region.

[0136] FIG. 6 shows sequence homology analysis for fragment 2 (3547 bp-12830 bp). The Query sequence (3547-12830 bp hCoV-19/batYN01) was BLAST against all the SARS-CoV-2 VOCs, human CoV strains; CoV strains from bats, pangolin, civet cats. 30 variants/strains were found with significant homology for this queried region.

[0137] FIG. 7 shows sequence homology analysis for fragment 3 (17472 bp-21156 bp). The Query sequence (17472-21156 bp hCoV-19/batYN01) was BLAST against all the SARS-CoV-2 VOCs, human CoV strains, CoV strains from bats, pangolin, civet cats. 29 variants/strains were found with significant homology for this queried region.

[0138] FIG. 8 shows sequence homology analysis for fragment 4 (22584 bp-24682 bp) which comprises the spike protein. The Query sequence (22584-24682 bp hCoV-19/batYN01) was BLAST against all the SARS-CoV-2 VOCs, human CoV strains, CoV strains from bats, pangolin, civet cats. 29 variants/strains were found with significant homology for this queried region.

[0139] FIG. 9 shows sequence homology analysis for fragment 5 (26193 bp-27421 bp). The Query sequence (26193-27421 bp hCoV-19/batYN01) was BLAST against all the SARS-CoV-2 VOCs, human CoV strains, CoV strains from bats, pangolin, civet cats. 31 variants/strains were found with significant homology for this queried region.

[0140] FIG. 10 shows a sequence homology analysis to screen conservancy of potential SARS-CoV-2-derived human CD8+ T cell epitopes. Shown are the comparison of sequence homology for the potential CD8+ T cell epitopes among 81,963 SARS-CoV-2 strains (that currently circulate in 190 countries on 6 continents), the 4 major “common cold” Coronaviruses that cased previous outbreaks (i.e. hCoV-OC43, hCoV-229E, hCoV-HKU1-Genotype B, and hCoV-NL63), and the SL-CoVs that were isolated from bats, civet cats, pangolins and camels. Epitope sequences highlighted in yellow present a high degree of homology among the currently circulating 81,963 SARS-CoV-2 strains and at least a 50% conservancy among two or more humans SARS-CoV strains from previous outbreaks, and the SL-CoV strains isolated from bats, civet cats, pangolins and camels, as described herein. Homo Sapiens—black, bats (Rhinolophus affinis, Rhinolophus malayanus—red), pangolins (Manis javanica—blue), civet cats (Paguma larvata—green), and camels (Camelus dromedaries-brown).

[0141] FIG. 11A shows docking of highly conserved SARS-CoV-2-derived human CD8+ T cell epitopes to HLA-A*02:01 molecules, e.g., docking of the 27 high-affinity CD8+ T cell binder peptides to the groove of HLA-A*02:01 molecules.

[0142] FIG. 11B shows a summary of the interaction similarity scores of the 27 high-affinity CDB8+ T cell epitope peptides to HLA-A*02:01 molecules determined by protein-peptide molecular docking analysis. Black columns depict CD8+ T cell epitope peptides with high interaction similarity scores.

[0143] FIG. 12A shows an experimental design show CD8+ T cells are specific to highly conserved SARS-CoV-2 epitopes detected in COVID-19 patients and unexposed healthy individuals: PBMCs from HLA-A*02:01 positive COVID-19 patients (n=30) and controls unexposed healthy individuals (n=10) were isolated and stimulated overnight with 10 μM of each of the 27 SARS-CoV-2-derived CD8+ T cell epitopes. The number of IFN-γ-producing cells were quantified using ELISpot assay.

[0144] FIG. 12B shows the results from FIG. 12A. Dotted lines represent threshold to evaluate the relative magnitude of the response: a mean SFCs between 25 and 50 correspond to a medium/intermediate response whereas a strong response is defined for a mean SFCs >50.

[0145] FIG. 12C shows the results from experiments where PBMCs from HLA-A*02:01 positive COVID-19 patients were further stimulated for an additional 5 hours in the presence of mAbs specific to CD107a and CD107b, and Golgi-plug and Golgi-stop. Tetramers specific to Spike epitopes, CD107a/b and CD69 and TNF-expression were then measured by FACS. Representative FACS plot showing the frequencies of Tetramer+CD8+ T cells, CD107a % b+CD8+ T cells, CD69+CD8+ T cells and TNF-+CDB8+ T cells following priming with a group of 4 Spike CD8+ T cell epitope peptides. Average frequencies of tetramer+CD8+ T cells, CD107a/b+CD8+ T cells, CD69+CD8+ T cells and TNF-+CD8+ T cells.

[0146] FIG. 13A shows a timeline of immunization and immunological analyses for experiments testing the immunogenicity of genome-wide identified human SARS-CoV-2 CD8+ T epitopes in HLA-A*02:01/HLA-DRB1 double transgenic mice. Eight groups of age-matched HLA-A*02:01 transgenic mice (n=3) were immunized subcutaneously, on days 0 and 14, with a mixture of four SARS-CoV-2-derived human CD8+ T cell peptide epitopes mixed with PADRE CD4+ T helper epitope, delivered in alum and CpG1826 adjuvants. As a negative control, mice received adjuvants alone (mock-immunized).

[0147] FIG. 13B shows the gating strategy used to characterize spleen-derived CD8+ T cells. Lymphocytes were identified by a low forward scatter (FSC) and low side scatter (SSC) gate. Singlets were selected by plotting forward scatter area (FSC-A) vs. forward scatter height (FSC-H). CD8 positive cells were then gated by the expression of CD8 and CD3 markers.

[0148] FIG. 13C shows a representative ELISpot image (left panel) and average frequencies (right panel) of IFN-γ-producing cell spots from splenocytes (106 cells/well) stimulated for 48 hours with 10 μM of 10 immunodominant CD8+ T cell peptides and 1 subdominant CD8+ T cell peptide out of the total pool of 27 CD8+ T cell peptides derived from SARS-CoV-2 structural and non-structural proteins. The number on the top of each ELISpot image represents the number of IFN-γ-producing spot forming T cells (SFC) per one million splenocytes.

[0149] FIG. 13D shows a representative FACS plot (left panel) and average frequencies (right panel) of IFN-γ and TNF-production by, and CD107a/b and CD69 expression on 10 immunodominant CD8+ T cell peptides and 1 subdominant CD8+ T cell peptide out of the total pool of 27 CD8+ T cell peptides derived from SARS-CoV-2 structural and non-structural proteins determined by FACS. Numbers indicate frequencies of IFN-γ+CD8+ T cells, CD107+CD8+ T cells, CD69+CD8+ T cells and TNF-+CD8+ T cells, detected in 3 immunized mice.

[0150] FIG. 14 shows the SARS-CoV/SARS-CoV-2 genome encodes two large non-structural genes ORF1a (green) and ORF1b (gray), encoding 16 non-structural proteins (NSP1-NSP16). The genome encodes at least six accessory proteins (shades of light grey) that are unique to SARS-CoV/SARS-CoV-2 in terms of number, genomic organization, sequence, and function. The common SARS-CoV, SARS-CoV-2 and SL-CoVs-derived human B (blue); CD4+ (green) and CD8+ (black) T cell epitopes are shown. Structural and non-structural open reading frames utilized in this study were from SARS-CoV-2-Wuhan-Hu-1 strain (NCBI accession number MN908947.3, SEQ ID NO: 1). The amino acid sequence of the SARS-CoV-2-Wuhan-Hu-1 structural and non-structural proteins was screened for human B, CD4+ and CD8+ T cell epitopes using different computational algorithms as described herein. Shown are genome-wide identified SARS-CoV-2 human B cell epitopes (in blue), CD4+ T cell epitopes (in green), CD8+ T cell epitopes (in black) that are highly conserved between human and animal Coronaviruses.

[0151] FIG. 15 shows the identification of highly conserved potential SARS-CoV-2-derived human CD4+ T cell epitopes that bind with high affinity to HLA-DR molecules: Out of a total of 9,594 potential HLA-DR-restricted CD4+ T cell epitopes from the whole genome sequence of SARS-CoV-2-Wuhan-Hu-1 strain (MN908947.3), 16 epitopes that bind with high affinity to HLA-DRB1 molecules were selected. The conservancy of the 16 CD4+ T cell epitopes was analyzed among human and animal Coronaviruses. Shown are the comparison of sequence homology for the 16 CD4+ T cell epitopes among 81,963 SARS-CoV-2 strains (that currently circulate in 6 continents), the 4 major “common cold” Coronaviruses that cased previous outbreaks (i.e. hCoV-OC43, hCoV-229E, hCoV-HKU1, and hCoV-NL63), and the SL-CoVs that were isolated from bats, civet cats, pangolins and camels. Epitope sequences highlighted in green present high degree of homology among the currently circulating 81,963 SARS-CoV-2 strains and at least a 50% conservancy among two or more humans SARS-CoV strains from previous outbreaks, and the SL-CoV strains isolated from bats, civet cats, pangolins and camels, as described in Materials and Methods. Homo Sapiens—black, bats (Rhinolophus affinis, Rhinolophus malayanus—red), pangolins (Manis javanica—blue), civet cats (Paguma larvata—green), and camels (Camelus dromedaries—brown).

[0152] FIG. 16A the molecular docking of highly conserved SARS-CoV-2 CD4+ T cell epitopes to HLA-DRBI molecules. Molecular docking of 16 CD4+ T cell epitopes, conserved among human SARS-CoV-2 strains, previous humans SARS/MERS-CoV and bat SL-CoVs into the groove of the HLA-DRB1 protein crystal structure (PDB accession no: 4UQ3) was determined using the GalaxyPepDock server. The 16 CD4+ T cell epitopes are promiscuous restricted to HLA-DRB1*01:01, HLA-DRB1*11:01, HLA-DRB1*15:01, HLA-DRB1*03:01 and HLA-DRB1*04:01 alleles. The CD4+ T cell peptides are shown in ball and stick structures, and the HLA-DRB1 protein crystal structure is shown as a template. The prediction accuracy is estimated from a linear model as the relationship between the fraction of correctly predicted binding site residues and the template-target similarity measured by the protein structure similarity score (TM score) and interaction similarity score (Sinter) obtained by linear regression. Sinter shows the similarity of the amino acids of the CD8+ T cell peptides aligned to the contacting residues in the amino acids of the HLA-DRB1 template structure.

[0153] FIG. 16B shows histograms representing interaction similarity score of CD4+ T cells specific epitopes observed from the protein-peptide molecular docking analysis.

[0154] FIG. 17A shows an experimental design to show CD4+ T cells are specific to highly conserved SARS-CoV-2 epitopes detected in COVID-19 patients and unexposed healthy individuals: PBMCs from HLA-DRB1 positive COVID-19 patients (n=30) and controls unexposed healthy individuals (n=10) were isolated and stimulated for 48 hrs. with 10 μM of each of the 16 SARS-CoV-2-derived CD4+ T cell epitopes. The number of IFN-producing cells were quantified using ELISpot assay.

[0155] FIG. 17B shows the results from FIG. 17A. Dotted lines represent a threshold to evaluate the relative magnitude of the response: a mean SFCs between 25 and 50 correspond to a medium/intermediate response, whereas a strong response is defined for a mean SFCs >50. PBMCs from HLA-DRB1-positive COVID-19 patients

[0156] FIG. 17C shows the results from further stimulating for an additional 5 hours in the presence of mAbs specific to CD107a and CD107b, and Golgi-plug and Golgi-stop. Tetramers specific to two Spike epitopes, CD107a/b and CD69 and TNF-alpha expression were then measured by FACS. Representative FACS plot showing the frequencies of Tetramer+CD4+ T cells, CD107a/b+CD4+ T cells, CD69+CD4+ T cells and TNF-+CD4+ T cells following priming with a group of 2 Spike CD4+ T cell epitope peptides. Average frequencies are shown for tetramer+CD4+ T cells, CD107a/b+CD4+ T cells, CD69+CD4+ T cells and TNF-+CD4+ T cells.

[0157] FIG. 18A shows a timeline of immunization and immunological analyses for testing immunogenicity of genome-wide identified human SARS-CoV-2 CD4.+ T epitopes in HLA-A*02:01/HLA-DRB1 double transgenic mice. Four groups of age-matched HLA-DRB1 transgenic mice (n=3) were immunized subcutaneously, on days 0 and 14, with a mixture of four SARS-CoV-2-derived human CD4+ T cell peptide epitopes delivered in alum and CpG1826 adjuvants. As a negative control, mice received adjuvants alone (mock-immunized).

[0158] FIG. 18B shows the gating strategy used to characterize spleen-derived CD4+ T cells. CD4 positive cells were gated by the CD4 and CD3 expression markers.

[0159] FIG. 18C shows the representative ELISpot images (left panel) and average frequencies (right panel) of IFN-γ-producing cell spots from splenocytes (106 cells/well) stimulated for 48 hours with 10 μM of 7 immunodominant CD4+ T cell peptides and 1 subdominant CD4+ T cell peptide out of the total pool of 16 CD4+ T cell peptides derived from SARS-CoV-2 structural and non-structural proteins. The number of IFN-γ-producing spot forming T cells (SFC) per one million of total cells is presented on the top of each ELISpot image.

[0160] FIG. 18D shows the representative FACS plot (left panel) and average frequencies (right panel) show IFN-γ and TNF-α-production by, and CD107a/b and CD69 expression on 7 immunodominant CD4+ T cell peptides and 1 subdominant CD4+ T cell peptide out of the total pool of 16 CD4+ T cell peptides derived from SARS-CoV-2 determined by FACS. The numbers indicate percentages of IFN-γ+CD4+ T cells, CD107+CD4+ T cells, CD69+CD4+ T cells and TNF-α+CD4+ T cells detected in 3 immunized mice.

[0161] FIG. 19 shows the conservation of Spike-derived B cell epitopes among human, bat, civet cat, pangolin, and camel coronavirus strains: Multiple sequence alignment performed using ClustalW among 29 strains of SARS coronavirus (SARS-CoV) obtained from human, bat, civet, pangolin, and camel. This includes 7 human SARS/MERS-CoV strains (SARS-CoV-2-Wuhan (MN908947.3), SARS-HCoV-Urbani (AY278741.1), CoV-HKU1-Genotype-B (AY884001), CoV-OC43 (KF923903), CoV-NL63 (NC005831), CoV-229E (KY983587), MERS (NC019843)); 8 bat SARS-CoV strains (BAT-SL-CoV-WIV16 (KT444582), BAT-SL-CoV-WIV1 (KF367457.1), BAT-SL-CoV-YNLF31C (KP886808.1), BAT-SARS-CoV-RS672 (FJ588686.1), BAT-CoV-RATG13 (MN996532.1), BAT-CoV-YN01 (EPIISL412976), BAT-CoV-YNO2 (EPIISL412977), BAT-CoV-19-ZXC21 (MG772934.1); 3 Civet SARS-CoV strains (SARS-CoV-Civet007 (AY572034.1), SARS-CoV-A022 (AY686863.1), SARS-CoV-B039 (AY686864.1)); 9 pangolin SARS-CoV strains (PCoV-GX-P2V (MT072864.1), PCoV-GX-P5E (MT040336.1), PCoV-GX-P5L (MT040335.1), PCoV-GX-P1E (MT040334.1), PCoV-GX-P4L (MT040333.1), PCoV-MP789 (MT084071.1), PCoV-GX-P3B (MT072865.1), PCoV-Guangdong-P2S (EPIISL410544), PCoV-Guangdong (EPHSL410721)); 4 camel SARS-CoV strains (Camel-CoV-HKU23 (KT368891.1), DcCoV-HKU23 (MN514967.1), MERS-CoV-Jeddah (KF917527.1), Riyadh/RY141 (NC028752.1)) and 1 recombinant strain (FJ211859.1)). Regions highlighted with blue color represent the sequence homology. The B cell epitopes, which showed at least 50% conservancy among two or more strains of the SARS Coronavirus or possess receptor-binding domain (RBD) specific amino acids were selected as candidate epitopes.

[0162] FIG. 20A shows the docking of SARS-CoV-2 Spike glycoprotein-derived B cell epitopes to human ACE2 receptor, e.g., molecular docking of 22 B-cell epitopes, identified from the SARS-CoV-2 Spike glycoprotein, with ACE2 receptors. B cell epitope peptides are shown in ball and stick structures whereas the ACE2 receptor protein is shown as a template. S471-501 and S369-393 peptide epitopes possess receptor binding domain region specific amino acid residues. The prediction accuracy is estimated from a linear model as the relationship between the fraction of correctly predicted binding site residues and the template-target similarity measured by the protein structure similarity score and interaction similarity score (Sinter) obtained by linear regression. Sinter shows the similarity of amino acids of the B-cell peptides aligned to the contacting residues in the amino acids of the ACE2 template structure. Higher Sinter score represents a more significant binding affinity among the ACE2 molecule and B-cell peptides.

[0163] FIG. 20B shows the summary of the interaction similarity score of 22 B cells specific epitopes observed from the protein-peptide molecular docking analysis. B cell epitopes with high interaction similarity scores are indicated in black.

[0164] FIG. 21A shows the timeline of immunization and immunological analyses for testing to show IgG antibodies are specific to SARS-CoV-2 Spike protein-derived B-cell epitopes in immunized B6 mice and in convalescent COVID-19 patients. A total of 22 SARS-CoV-2 derived B-cell epitope peptides selected from SARS-CoV-2 Spike protein and tested in B6 mice were able to induce antibody responses. Four groups of age-matched B6 mice (n=3) were immunized subcutaneously, on days 0 and 14, with a mixture of 4 or 5 SARS-CoV-2 derived B-cell peptide epitopes emulsified in alum and CpG1826 adjuvants. AlumCpG1826 adjuvants alone were used as negative controls (mock-immunized).

[0165] FIG. 21B shows the frequencies of IgG-producing CD3(−)CD138(+)B220(+) plasma B cells were determined in the spleen of immunized mice by flow cytometry. For example, FIG. 21B shows the gating strategy was as follows: Lymphocytes were identified by a low forward scatter (FSC) and low side scatter (SSC) gate. Singlets were selected by plotting forward scatter area (FSC-A) versus forward scatter height (FSC-H). B cells were then gated by the expression of CD3(−) and B220(+) cells and CD138 expression on plasma B cells determined.

[0166] FIG. 21C shows the frequencies of IgG-producing CD3(−)CD138(+)B220(+) plasma B cells were determined in the spleen of immunized mice by flow cytometry. For example, FG 15C shows a representative FACS plot (left panels) and average frequencies (right panel) of plasma B cells detected in spleen of immunized mice. The percentages of plasma CD138(−)B220(+)B cells are indicated on the top left of each dot plot,

[0167] FIG. 21D shows SARS-CoV-2 derived B-cell epitopes-specific IgG responses were quantified in immune serum, 14 days post-second immunization (i.e. day 28), by ELISpot (Number of IgG(+)Spots). Representative ELISpot images (left panels) and average frequencies (right panel) of anti-peptide specific IgG-producing B cell spots (1×106 splenocytes/well) following 4 days in vitro B cell polyclonal stimulation with mouse Poly-S (Immunospot). The top/left of each ELISpot image shows the number of IgG-producing B cells per half a million cells. ELISA plates were coated with each individual immunizing peptide.

[0168] FIG. 21E shows the B-cell epitopes-specific IgG concentrations (μg/mL) measured by ELISA in levels of IgG detected in peptide-immunized 86 mice, after subtraction of the background measured from mock-vaccinated mice. The dashed horizontal line indicates the limit of detection.

[0169] FIG. 21F and FIG. 21G show the B-cell epitopes-specific IgG concentrations (μg/mL) measured by ELISA in Level of IgG specific to each of the 22 Spike peptides detected SARS-CoV-2 infected patients (n=40), after subtraction of the background measured from healthy non-exposed individuals (n=10). Black bars and gray bars show high and medium immunogenic B cell peptides, respectively. The dashed horizontal line indicates the limit of detection.

[0170] FIG. 22 shows an example of a whole spike protein comprising mutations including 6 proline mutations. The 6 proline mutations comprise single point mutations F817P, A892P, A899P, A942P, K986P and V987P. Additionally, the spike protein comprises a 682-QQAQ-685 mutation of the furin cleavage site for protease resistance. In some embodiments, the K986P and V987P Mutations allow for perfusion stabilization. FIG. 22 also shows the following sequences: MFVFLVLLPLVSS (SEQ ID NO: 63), ATGTTCGTGTTCCTGGTGCTGCTGCCCCTGGTGAGCAGC (SEQ ID NO: 422), CAGCAGGCCCAG (SEQ ID NO: 423), and CCCCCC.

[0171] FIG. 23 shows non-limiting examples of how the large sequences of the compositions described herein may be arranged.

[0172] FIG. 24 shows a schematic representation of a prototype Coronavirus vaccine of the present invention. The present invention is not limited to the prototype coronavirus vaccines as shown.

[0173] FIG. 25A shows a non-limiting example of a method for delivering the vaccine composition described herein using a “prime/pull” regimen in humans. The method comprises administering a pan-coronavirus recombinant vaccine composition and further administering at least one T-cell attracting chemokine (e.g. CXCL11) after administering the pan-coronavirus recombinant vaccine composition.

[0174] FIG. 25B shows a non-limiting example of a method for delivering the vaccine composition described herein using a “prime/boost” regimen in humans. The method comprises administering a first composition, e.g., a first pan-coronavirus recombinant vaccine composition dose using a first delivery system and further administering a second composition, e.g., a second vaccine composition dose using a second delivery system. In some embodiments, the first delivery system and the second delivery system are different.

[0175] FIG. 25C shows a non-limiting example of a method for delivering the vaccine composition described herein using a “prime/pull/keep” regimen in humans to increase the size and maintenance of lung-resident B-cells, CD4+ T cells and CD8+ T cells to protect against SARS-CoV-2. The method comprises administering a pan-coronavirus recombinant vaccine composition and administering at least one T-cell attracting chemokine (e.g. CXCL11 or CXCL17) after administering the pan-coronavirus recombinant vaccine composition.

[0176] FIG. 25D shows a non-limiting example of a method for delivering the vaccine composition described herein using a “prime/pull/boost” regimen in humans to increase the size and maintenance of lung-resident B-cells, CD4+ T cells and CD8+ T cells to protect against SARS-CoV-2. The method comprises administering a pan-coronavirus recombinant vaccine composition and administering at least one T-cell attracting chemokine (e.g. CXCL11 or CXCL17) after administering the pan-coronavirus recombinant vaccine composition. The method further comprises administering at least one cytokine after administering the T-cell attracting chemokine (e.g. IL-7, IL-5, or IL-2).

[0177] FIG. 26A shows a non-limiting example of a method for delivering the vaccine composition described herein using a “prime/pull” regimen in domestic animals (e.g. cats or dogs). The method comprises administering a pan-coronavirus recombinant vaccine composition and further administering at least one T-cell attracting chemokine (e.g. CXCL11) after administering the pan-coronavirus recombinant vaccine composition.

[0178] FIG. 26B shows a non-limiting example of a method for delivering the vaccine composition described herein using a “prime/boost” regimen in domestic animals (e.g. cats or dogs). The method comprises administering a first composition, e.g., a first pan-coronavirus recombinant vaccine composition dose using a first delivery system and further administering a second composition, e.g., a second vaccine composition dose using a second delivery system. In some embodiments, the first delivery system and the second delivery system are different.

[0179] FIG. 26C shows a non-limiting example of a method for delivering the vaccine composition described herein using a “prime/pull/keep” regimen in domestic animals (e.g. cats or dogs) to increase the size and maintenance of lung-resident B-cells, CD4+ T cells and CD8+ T cells to protect against SARS-CoV-2. The method comprises administering a pan-coronavirus recombinant vaccine composition and administering at least one T-cell attracting chemokine (e.g. CXCL11 or CXCL17) after administering the pan-coronavirus recombinant vaccine composition.

[0180] FIG. 26D shows a non-limiting example of a method for delivering the vaccine composition described herein using a “prime/pull/boost” regimen in domestic animals (e.g. cats or dogs) to increase the size and maintenance of lung-resident B-cells, CD4+ T cells and CD8+ T cells to protect against SARS-CoV-2. The method comprises administering a pan-coronavirus recombinant vaccine composition and administering at least one T-cell attracting chemokine (e.g. CXCL11 or CXCL17) after administering the pan-coronavirus recombinant vaccine composition. The method further comprises administering at least one cytokine after administering the T-cell attracting chemokine (e g. IL-7, IL-5, or IL-2),

[0181] FIGS. 27A, 27B, and 27C shows experimental evidence showing immunization with pool of CD8⁺ T cell, CD4⁺ T cell, and B cell peptides to provide protection against all the current SARS-CoV-2 variants of concerns in triple transgenic h-ACE2-HLA-A2/DR mice. Viral titration (FIG. 27A), weight loss (FIG. 27B), and survival (FIG. 27C) data have been shown.

[0182] FIG. 28 shows non-limiting configurations of recombinant vaccine compositions described herein.

[0183] FIGS. 29A and 29B show non-limiting examples of recombinant hybrid vaccine compositions described herein. The proteins may be covalently or non-covalently linked together for administration of the vaccine composition. Note: “Nsp” may refer to Nsp1, Nsp2, Nsp3, Nsp5, Nsp6, Nsp7, Nsp8, Nsp9, Nsp10, Nsp12, Nsp13, Nsp14, Nsp15, Nsp16, or a combination thereof, “Spike protein” may refer to a portion of the spike protein, or a spike protein with one or more mutations (e.g., a spike protein with two or six proline substitutions).

[0184] FIG. 30 shows the results of a sequence alignment of various influenza viruses and variants and the resulting conserved region.

[0185] FIG. 31 shows non-limiting examples of recombinant vaccine compositions described herein.

[0186] FIG. 32A shows non-limiting examples of influenza proteins and SARS-CoV2 proteins that may be used in the vaccine compositions as described herein; these proteins may be used in any combination to create said compositions. Note: Nsp may refer to Nsp1, Nsp2, Nsp3, Nsp5, Nsp6, Nsp7, Nsp8, Nsp9, Nsp10, Nsp12, Nsp13. Nsp14. Nsp15, Nsp16, or a combination thereof.

[0187] FIG. 32B shows non-limiting examples of recombinant hybrid vaccine compositions described herein. The proteins may be covalently or non-covalently linked together for administration of the vaccine composition. Note: “Nsp” may refer to Nsp1, Nsp2, Nsp3, Nsp5, Nsp6, Nsp7, Nsp8, Nsp9, Nsp10, Nsp12, Nsp13, Nsp14, Nsp15, Nsp16, or a combination thereof, “Spike protein” may refer to a portion of the spike protein, or a spike protein with one or more mutations (e.g., a spike protein with two or six proline substitutions).

[0188] FIG. 33 shows schematic views of non-limiting examples of vaccine compositions showing an optional molecular adjuvant, T cell attracting chemokine, and/or composition for promoting T cell proliferation, as well as non-limiting examples of orientations of said optional molecular adjuvant, T cell attracting chemokine, and/or composition for promoting T cell proliferation.

[0189] FIG. 34A shows an experimental plan to determine the efficacy of (1) Ad5-Pan-CoV-Vaccines and (2) mRNA-LNP vaccine against the SARS-CoV-2 Delta (B.1.617.2) variant in golden hamsters. Briefly, at Day 0 the hamsters were immunized with mRNA-LNP vaccines (off the shelf LNP; volume: 50 μl); at Day 14 the hamsters were immunized intramuscularly with Ad5 vaccines (as per doses mentioned FIG. 34B: Volume: 50 μl (Ad5 vector+PBS)); at Day 21 the hamsters were immunized with mRNA-LNP vaccines (off the shelf LNP: Volume: 50 μl). For mRNA-LNP immunized hamsters: Infection 42 days after first immunization with 5×10⁵ pfu of SARS-CoV-2 B.617.2 variant (Delta) intranasally (total in both nostril) Total volume of virus given: 208 μl by the intranasal route. For Ad5 immunized hamsters: Infection 28 days after first immunization with 5×10⁵ pfu of SARS-CoV-2 B.617.2 variant (Delta) intranasally (total in both nostril) Total volume of virus given: 208 μl by the intranasal route.

[0190] FIG. 34B shows the doses given of each vaccine.

[0191] FIG. 35 de-risking of program demonstration of additive protective effect of T cells and antibodies. qRT-PCR data shows a reduction of viral copy number for hamsters immunized with Ad-5 Pan-CoV-Vaccines (i) Spike-6P (10⁸)+Nucleocapsid (10¹⁰) and (fi) Spike-6P (10⁸)+NSP3 (10¹⁰) against the SARS-CoV-2 Delta (B.1.6117.2) variant in golden hamsters.

[0192] FIGS. 36A and 36B show de-risking of program demonstration of additive protective effect of T cells and antibodies. FIG. 36A shows Physical estimation for hamsters immunized with Ad-5 Pan-CoV-Vaccines (i) Spike-6P (10⁸), (ii) Spike-61P (10⁸)+NSP3 (10¹⁰), (iii) NSP3 (10¹⁰) against the SARS-CoV-2 Delta (B.1.617.2) variant. FIG. 36B shows physical estimation for hamsters immunized with Ad-5 Pan-CoV-Vaccines (I) Spike-6P (10⁸), (ii) Spike-6P (10⁸)+Nucleocapsid (10¹⁰), (iii) Nucleocapsid (10¹⁰) against the SARS-CoV-2 Delta (B.1.617.2) variant. The arrows indicate an early additive or synergetic beneficial protective effect of adding Nucleoprotein to Spike.

[0193] FIGS. 37A and 378 show hamsters challenged with SARS-CoV-2 Delta variant then rechallenged with Omicron variant.

[0194] FIG. 38 shows qRT-PCR data demonstrating reduced viral copy number for hamsters immunized with Ad-5 Pan-CoV-Vaccines (i) Spike-6P (10⁸)+Nucleocapsid (10¹⁰) and (ii) Spike-6P (10⁸)+NSP3 (10¹⁰) against the SARS-CoV-2 Omicron variant in golden hamsters. The hamsters were immunized with Ad5 vectors and challenged initially with Delta variant on Day 28 post immunization. Subsequently the same group of animals were re-challenged with Omicron variant to see the beneficial additive or synergetic protective effect of adding Nucleoprotein to Spike.

[0195] FIG. 39 shows de-risking of program demonstration of additive protective effect of T cells and antibodies. Hamsters challenged with SARS-CoV-2 Delta variant.

[0196] FIG. 40 shows neutralizing antibodies produced against SARS-CoV-2 Delta variant.

[0197] FIG. 41 shows preclinical PoC of prototype T plus B cell SARS-CoV-2 vaccines Nucleoprotein plus Spike. Hamsters challenged with SARS-CoV-2 Washington variant.

[0198] FIG. 42 shows anti-SARS-CoV-2 Spike specific IgG measured in the serum of Hamsters immunized with, LNP encapsulated mRNA containing Spike-Hexapro alone and Spike-Hexapro mixed with Nucleoprotein on day 10, 40 and 70 after second immunization. Time kinetics based on ELISA data showing statistically significant increase in spike specific antibody in the serum of hamsters immunized with Spike-Hexapro mixed with Nucleoprotein compared to Spike-Hexapro alone. Plates were coated with 100 ng of Spike (S1+S2) from Sino biological.

[0199] FIG. 43 shows the protective role of T cells against virus. ACE-2/HLA-I/HLA-II transgenic mice were challenge 10⁴ pfu of SARS-CoV-2 Washington variant.

[0200] FIG. 44 shows non-limiting examples of how the vaccine compositions described herein may be administered.

### TERMS

[0201] Unless otherwise explained, all technical and scientific terms used herein have the same meaning as commonly understood by one of ordinary skill in the art to which a disclosed invention belongs. The singular terms “a,” “an,” and “the” include plural referents unless context clearly indicates otherwise. Similarly, the word “or” is intended to include “and” unless the context clearly indicates otherwise. The term “comprising” means that other elements can also be present in addition to the defined elements presented. The use of “comprising” indicates inclusion rather than limitation. Stated another way, the term “comprising” means “including principally, but not necessary solely”. Furthermore, variation of the word “comprising”, such as “comprise” and “comprises”, have correspondingly the same meanings. In one respect, the technology described herein related to the herein described compositions, methods, and respective component(s) thereof, as essential to the invention, yet open to the inclusion of unspecified elements, essential or not (“comprising”).

[0202] Suitable methods and materials for the practice and/or testing of embodiments of the disclosure are described below. Such methods and materials are illustrative only and are not intended to be limiting. Other methods and materials similar or equivalent to those described herein can be used. For example, conventional methods well known in the art to which the disclosure pertains are described in various general and more specific references, including, for example, Sambrook et. al., Molecular Cloning: A Laboratory Manual, 2d ed., Cold Spring Harbor Laboratory Press, 1989; Sambrook et al., Molecular Cloning: A Laboratory Manual, 3d ed., Cold Spring Harbor Press, 2001; Ausubel et al., Current Protocols in Molecular Biology, Greene Publishing Associates, 1992 (and Supplements to 2000); Ausubel et al., Short Protocols in Molecular Biology: A Compendium of Methods from Current Protocols in Molecular Biology, 4th ed., Wiley & Sons, 1999; Harlow and Lane, Antibodies: A Laboratory Manual, Cold Spring Harbor Laboratory Press, 1990; and Harlow and Lane, Using Antibodies: A Laboratory Manual, Cold Spring Harbor Laboratory Press, 1999, Gene Expression Technology (Methods in Enzymology, Vol. 185, edited by D. Goeddel, 1991. Academic Press, San Diego, Calif.), “Guide to Protein Purification” in Methods in Enzymology (M. P. Deutshcer, ed., (1990) Academic Press, Inc.); PCR Protocols: A Guide to Methods and Applications (Innis, et al. 1990. Academic Press, San Diego, Calif.), Culture of Animal Cells: A Manual of Basic Technique, 2^{nd} Ed. (R. I. Freshney. 1987. Liss, Inc. New York, N.Y.), Gene Transfer and Expression Protocols, pp. 109-128, ed. E. J. Murray, The Humana Press Inc., Clifton, N.J.), and the Ambion 1998 Catalog (Ambion, Austin, Tex.), the disclosures of which are incorporated in their entirety herein by reference.

[0203] Although methods and materials similar or equivalent to those described herein can be used to practice or test the disclosed technology, suitable methods and materials are described below. The materials, methods, and examples are illustrative only and not intended to be limiting.

[0204] As used herein, the terms “immunogenic protein, polypeptide, or peptide” or “antigen” refer to polypeptides or other molecules (or combinations of polypeptides and other molecules) that are immunologically active in the sense that once administered to the host, it is able to evoke an immune response of the humoral and/or cellular type directed against the protein. In embodiments, the protein fragment has substantially the same immunological activity as the total protein. Thus, a protein fragment according to the disclosure can comprise or consist essentially of or consist of at least one epitope or antigenic determinant. An “immunogenic” protein or polypeptide, as used herein, may include the full-length sequence of the protein, analogs thereof, or immunogenic fragments thereof. “Immunogenic fragment” refers to a fragment of a protein which includes one or more epitopes and thus elicits the immunological response described above.

[0205] Synthetic antigens are also included within the definition, for example, poly-epitopes, flanking epitopes, and other recombinant or synthetically derived antigens. Immunogenic fragments for purposes of the disclosure may feature at least about 1 amino acid, at least about 3 amino acids, at least about 5 amino acids, at least about 10-15 amino acids, or about 15-25 amino acids or more amino acids, of the molecule. There is no critical upper limit to the length of the fragment, which could comprise nearly the full-length of the protein sequence, or the full-length of the protein sequence, or even a fusion protein comprising at least one epitope of the protein.

[0206] As used herein, the term “epitope” refers to the site on an antigen or hapten to which specific B cells and/or T cells respond. The term is also used interchangeably with “antigenic determinant” or “antigenic determinant site”. Antibodies that recognize the same epitope can be identified in a simple immunoassay showing the ability of one antibody to block the binding of another antibody to a target antigen.

[0207] As used herein, the term “immunological response” to a composition or vaccine refers to the development in the host of a cellular and/or antibody-mediated immune response to a composition or vaccine of interest. Usually, an “immunological response” includes but is not limited to one or more of the following effects: the production of antibodies, B cells, helper T cells, and/or cytotoxic T cells, directed specifically to an antigen or antigens included in the composition or vaccine of interest. The host may display either a therapeutic or protective immunological response so resistance to new infection will be enhanced and/or the clinical severity of the disease reduced. Such protection will be demonstrated by either a reduction or lack of symptoms normally displayed by an infected host, a quicker recovery time and/or a lowered viral titer in the infected host.

[0208] As used herein, the term “variant” refers to a substantially similar sequence. For polynucleotides, a variant comprises a deletion and/or addition and/or change of one or more nucleotides at one or more sites within the native polynucleotide and/or a substitution of one or more nucleotides at one or more sites in the native polynucleotide. As used herein, a “native” polynucleotide or polypeptide comprises a naturally occurring nucleotide sequence or an amino acid sequence, respectively. Variants of a particular polynucleotide of the disclosure (e.g., the reference polynucleotide) can also be evaluated by comparison of the percent sequence identity between the polypeptide encoded by a variant polynucleotide and the polypeptide encoded by the reference polynucleotide. “Variant” protein is intended to mean a protein derived from the native protein by deletion or addition of one or more amino acids at one or more sites in the native protein and/or substitution of one or more amino acids at one or more sites in the native protein. Variant proteins encompassed by the present disclosure are biologically active, that is they have the ability to elicit an immune response.

[0209] The HLA-DR/HLA-A*0201/hACE2 triple transgenic mouse model referred to herein is a novel susceptible animal model for pre-clinical testing of human COVID-19 vaccine candidates derived from crossing ACE2 transgenic mice with the unique HLA-DR/HLA-A*0201 double transgenic mice. ACE2 transgenic mice are a hACE2 transgenic mouse model expressing human ACE2 receptors in the lung, heart, kidney and intestine (Jackson Laboratory, Bar Harbor, Me.). The HLA-DR/HLA-A*0201 double transgenic mice are “humanized” HLA double transgenic mice expressing Human Leukocyte Antigen HLA-A*0201 class I and HLA DR*0101 class II in place of the corresponding mouse MHC molecules (which are knocked out). The HLA-A*0201 haplotype was chosen because it is highly represented (>50%) in the human population, regardless of race or ethnicity. The HLA-DR/HLA-A*0201/hACE2 triple transgenic mouse model is a “humanized” transgenic mouse model and has three advantages: (1) it is susceptible to human SARS-CoV2 infection; (2) it develops symptoms similar to those seen in COVID-19 in humans; and (3) it develops CD4⁺ T cells and CD8⁺ T cells response to human epitopes. The novel HLA-DR/HLA-A*0201/hACE2 triple transgenic mouse model of the present invention may be used in the pre-clinical testing of safety, immunogenicity and protective efficacy of the human multi-epitope COVID-19 vaccine candidates of the present invention.

[0210] As used herein, the terms “treat” or “treatment” or “treating” refers to both therapeutic treatment and prophylactic or preventative measures, wherein the object is to prevent or slow the development of the disease, such as slow down the development of a disorder, or reducing at least one adverse effect or symptom of a condition, disease or disorder, e.g., any disorder characterized by insufficient or undesired organ or tissue function. Treatment is generally “effective” if one or more symptoms or clinical markers are reduced as that term is defined herein. Alternatively, a treatment is “effective” if the progression of a disease is reduced or halted. That is, “treatment” includes not just the improvement of symptoms or decrease of markers of the disease, but also a cessation or slowing of progress or worsening of a symptom that would be expected in absence of treatment. Beneficial or desired clinical results include, but are not limited to, alleviation of one or more symptom(s), diminishment of extent of disease, stabilized (e.g., not worsening) state of disease, delay or slowing of disease progression, amelioration or palliation of the disease state, and remission (whether partial or total), whether detectable or undetectable. “Treatment” can also mean prolonging survival as compared to expected survival if not receiving treatment. “Treatment” also includes ameliorating a disease, lessening the severity of its complications, preventing it from manifesting, preventing it from recurring, merely preventing it from worsening, mitigating an inflammatory response included therein, or a therapeutic effort to affect any of the aforementioned, even if such therapeutic effort is ultimately unsuccessful.

[0211] As used herein, the term “carrier” or “pharmaceutically acceptable carrier” or “pharmaceutically acceptable vehicle” refers to any appropriate or useful carrier or vehicle for introducing a composition to a subject. Pharmaceutically acceptable carriers or vehicles may be conventional but are not limited to conventional vehicles. For example, E. W. Martin, Remington's Pharmaceutical Sciences, Mack Publishing Co., Easton, Pa., 15th Edition (1975) and D. B. Troy, ed. Remington: The Science and Practice of Pharmacy, Lippincott Williams & Wilkins, Baltimore Md. and Philadelphia, Pa., 21^{st} Edition (2006) describe compositions and formulations suitable for pharmaceutical delivery of one or more therapeutic compounds or molecules. Carriers (e.g., pharmaceutical carriers, pharmaceutical vehicles, pharmaceutical compositions, pharmaceutical molecules, etc.) are materials generally known to deliver molecules, proteins, cells and/or drugs and/or other appropriate material into the body. In general, the nature of the carrier will depend on the nature of the composition being delivered as well as the particular mode of administration being employed. In addition to biologically-neutral carriers, pharmaceutical compositions administered may contain minor amounts of non-toxic auxiliary substances, such as wetting or emulsifying agents, preservatives, and pH buffering agents and the like. Patents that describe pharmaceutical carriers include, but are not limited to: U.S. Pat. Nos. 6,667,371; 6,613,355; 6,596,296; 6,413,536; 5,968,543; 4,079,038; 4,093,709; 4,131,648; 4,138,344; 4,180,646; 4,304,767; 4,946,931, the disclosures of which are incorporated in their entirety by reference herein. The carrier may, for example, be solid, liquid (e.g., a solution), foam, a gel, the like, or a combination thereof. In some embodiments, the carrier comprises a biological matrix (e.g., biological fibers, etc.). In some embodiments, the carrier comprises a synthetic matrix (e.g., synthetic fibers, etc.). In certain embodiments, a portion of the carrier may comprise a biological matrix and a portion may comprise synthetic matrix.

[0212] As used herein “coronavirus” may refer to a group of related viruses such as but not limited to severe acute respiratory syndrome (SARS), middle east respiratory syndrome (MERS), and severe acute respiratory syndrome coronavirus 2 (SARS-CoV-2). All the coronaviruses cause respiratory tract infection that range from mild to lethal in mammals. Several non-limiting examples of Coronavirus strains are described herein. In some embodiments, the compositions may protect against any Sarbecoviruses including but not limited to SARS-CoV1 or SARS-CoV2. As used herein, “severe acute respiratory syndrome coronavirus 2 (SARS-CoV2)” is a betacoronavirus that causes Coronavirus Disease 19 (COVID-19).

[0213] A “subject” is an individual and includes, but is not limited to, a mammal (e.g., a human, horse, pig, rabbit; dog, sheep, goat, non-human primate, cow, cat, guinea pig, or rodent), a fish, a bird, a reptile or an amphibian. The term does not denote a particular age or sex. Thus, adult and newborn subjects, as well as fetuses, whether male or female, are intended to be included. A “patient” is a subject afflicted with a disease or disorder. The term “patient” includes human and veterinary subjects

[0214] The terms “administering” and “administration” refer to methods of providing a pharmaceutical preparation to a subject. Such methods are well known to those skilled in the art and include, but are not limited to, administering the compositions orally, parenterally (e.g., intravenously and subcutaneously), by intramuscular injection, by intraperitoneal injection, intrathecally, transdermally, extracorporeally, topically or the like.

[0215] A composition can also be administered by topical intranasal administration (intranasally) or administration by inhalant. As used herein, “topical intranasal administration” means delivery of the compositions into the nose and nasal passages through one or both of the nares and can comprise delivery by a spraying mechanism (device) or droplet mechanism (device), or through aerosolization of the composition. Administration of the compositions by inhalant can be through the nose or mouth via delivery by a spraying or droplet mechanism. As used herein, “an inhaler” can be a spraying device or a droplet device for delivering a composition comprising the vaccine composition, in a pharmaceutically acceptable carrier, to the nasal passages and the upper and/or lower respiratory tracts of a subject. Delivery can also be directly to any area of the respiratory system (e.g., lungs) via intratracheal intubation. The exact amount of the compositions required will vary from subject to subject, depending on the species, age, weight and general condition of the subject, the severity of the disorder being treated, the particular composition used, its mode of administration and the like. Thus, it is not possible to specify an exact amount for every composition. However, an appropriate amount can be determined by one of ordinary skill in the art using only routine experimentation given the teachings herein.

[0216] A composition can also be administered by buccal delivery or by sublingual delivery. As used herein “buccal delivery” may refer to a method of administration in which the compound is delivered through the mucosal membranes lining the cheeks. In some embodiment, for a buccal delivery the vaccine composition is placed between the gum and the cheek of a patient. As used herein “sublingual delivery” may refer to a method of administration in which the compound is delivered through the mucosal membrane under the tongue. In some embodiments, for a sublingual delivery the vaccine composition is administered under the tongue of a patient.

[0217] Parenteral administration of the composition, if used, is generally characterized by injection. Injectables can be prepared in conventional forms, either as liquid solutions or suspensions, solid forms suitable for solution of suspension in liquid prior to injection, or as emulsions. A more recently revised approach for parenteral administration involves use of a slow release or sustained release system such that a constant dosage is maintained. See, for example, U.S. Pat. No. 3,610,795, which is incorporated by reference herein.

### DETAILED DESCRIPTION OF THE INVENTION

[0218] Before the present compounds, compositions, and/or methods are disclosed and described, it is to be understood that this invention is not limited to specific synthetic methods or to specific compositions, as such may, of course, vary. It is also to be understood that the terminology used herein is for the purpose of describing particular embodiments only and is not intended to be limiting. Embodiments of the present invention can be freely combined with each other if they are not mutually exclusive.

### Pan-Coronavirus Vaccines

[0219] The present invention features preemptive pan-coronavirus vaccines, methods of use, and methods of producing said vaccines, methods of preventing coronavirus infections, etc. The present invention also provides methods of testing said vaccines, e.g., using particular animal models and clinical trials. The vaccine compositions herein can induce efficient and powerful protection against the coronavirus disease or infection, e.g., by inducing the production of antibodies (Abs), CD4+ T helper (Th1) cells, and CD8+ cytotoxic T-cells (CTL).

[0220] The vaccine compositions, e.g., the antigens, herein feature multiple large sequences which may comprise multiple conserved epitopes, that helps provide multiple opportunities for the body to develop an immune response for preventing an infection. Further, the vaccines herein may be designed to be effective against past, current, and future coronavirus outbreaks.

[0221] The vaccine composition comprises multiple large sequences. In certain embodiments, the large sequences are conserved large sequences, e.g., sequences that are highly conserved among human coronaviruses and/or animal coronaviruses (e.g., coronaviruses isolated from animals susceptible to coronavirus infections).

[0222] The present invention describes the identification of conserved large sequences comprising B cell, CD4+ T cell, and CD8+ T cell epitopes. For example, FIG. 1 shows a schematic of the development of a pre-emptive pan coronavirus vaccine featuring multiple conserved large sequences comprising multiple B cell epitopes, multiple conserved CD8⁺ T cell epitopes, and multiple CD4+ T cell epitopes. The large sequences are derived from sequence analysis of many coronaviruses.

[0223] Coronaviruses used for determining conserved large sequences may include human SARS-CoVs as well as animal CoVs (e.g. bats, pangolins, civet cats, minks, camels, etc.) as described herein. As an example, FIG. 2A and FIG. 2B show an evolutionary comparison of genome sequences among beta-coronavirus strains isolated from humans and animals. FIG. 2A shows a phylogenetic analysis performed between SARS-CoV-2 strains (obtained from humans (Homo sapiens (black)), along with the animal's SARS-like Coronaviruses genome sequence (SL-CoVs) sequences obtained from bats (Rhinolophus affinis, Rhinolophus malayanus (red)), pangolins (Manis javanica (blue)), civet cats (Paguma larvata (green)), and camels (Camelus dromedarius (Brown)). The included SARS-CoV/MERS-CoV strains are from previous outbreaks (obtained from humans (Urbani, MERS-CoV, OC43, NL63, 229E, HKU1-genotype-B), bats (WIV16, WIV1, YNLF-31C, Rs672, recombinant strains), camel (Camelus dromedarius, (KT368891.1, MN514967.1, KF917527.1, NC_028752.1), and civet (Civet007, A022, 8039)). The human SARS-CoV-2 genome sequences are represented from six continents. FIG. 2B shows an evolutionary analysis performed among the human-SARS-CoV-2 genome sequences reported from six continents and SARS-CoV-2 genome sequences obtained from bats (Rhinolophus affinis, Rhinolophus malayanus), and pangolins (Manis javanica)).

[0224] Additionally, other coronaviruses may be used for determining conserved large sequences (including human SARS-CoVs as well as animal CoVs (e.g., bats, pangolins, civet cats, minks, camels, etc.)) that meet the criteria to be classified as “variants of concern” or “variants of interest.” Coronavirus variants that appear to meet one or more of the undermentioned criteria may be labeled “variants of interest” or “variants under investigation” pending verification and validation of these properties. In some embodiments, the criteria may include increased transmissibility, increased morbidity, increased mortality, increased risk of “long COVID”, ability to evade detection by diagnostic tests, decreased susceptibility to antiviral drugs (if and when such drugs are available), decreased susceptibility to neutralizing antibodies, either therapeutic (e.g., convalescent plasma or monoclonal antibodies) or in laboratory experiments, ability to evade natural immunity (e.g., causing reinfections), ability to infect vaccinated individuals, increased risk of particular conditions such as multisystem inflammatory syndrome or long-haul COVID or increased affinity for particular demographic or clinical groups, such as children or immunocompromised individuals. Once validated variants of interest are renamed “variant of concern” by monitoring organizations, such as the CDC.

[0225] The conserved large sequences may be derived from structural (e.g., spike glycoprotein, envelope protein, membrane protein, nucleoprotein) or non-structural proteins of the coronaviruses (e.g., any of the 16 NSPs encoded by ORF1a/b).

[0226] In some embodiments, the large sequences are each highly conserved among one or a combination of: SARS-CoV-2 human strains, SL-CoVs isolated from bats, SL-CoVs isolated from pangolin, SL-CoVs isolated from civet cats; and MERS strains isolated from camels. For example, in certain embodiments, the large sequences are each highly conserved among one or a combination of: at least 50,000 SARS-CoV-2 human strains, five SL-CoVs isolated from bats, five SL-CoVs isolated from pangolin, three SL-CoVs isolated from civet cats, and four MERS strains isolated from camels. In certain embodiments, the large sequences are each highly conserved among one or a combination of: at least 80,000 SARS-CoV-2 human strains, five SL-CoVs isolated from bats, five SL-CoVs isolated from pangolin, three SL-CoVs isolated from civet cats, and four MERS strains isolated from camels. In certain embodiments, the large sequences are each highly conserved among one or a combination of: at least 50,000 SARS-CoV-2 human strains in circulation during the COVID-19 pandemic, at least one CoV that caused a previous human outbreak, five SL-CoVs isolated from bats, five SL-CoVs isolated from pangolin, three SL-CoVs isolated from civet cats, and four MERS strains isolated from camels. In certain embodiments, the large sequences are each highly conserved among at least 1 SARS-CoV-2 human strain in current circulation, at least one CoV that has caused a previous human outbreak, at least one SL-CoV isolated from bats, at least one SL-CoV isolated from pangolin, at least one SL-CoV isolated from civet cats, and at least one MERS strain isolated from camels. In certain embodiments, the large sequences are each highly conserved among at least 1,000 SARS-CoV-2 human strains in current circulation, at least two CoVs that has caused a previous human outbreak, at least two SL-CoVs isolated from bats, at least two SL-CoVs isolated from pangolin, at least two SL-CoVs isolated from civet cats, and at least two MERS strains isolated from camels. In certain embodiments, the large sequences are each highly conserved among one or a combination of: at least one SARS-CoV-2 human strain in current circulation, at least one CoV that has caused a previous human outbreak, at least one SL-CoV isolated from bats, at least one SL-CoV isolated from pangolin, at least one SL-CoV isolated from civet cats, and at least one MERS strain isolated from camels. The present invention is not limited to the aforementioned coronavirus strains that may be used to identify conserved large sequences.

[0227] In certain embodiments, one or more of the conserved large sequences are derived from one or more SARS-CoV-2 human strains or variants in current circulation; one or more coronaviruses that has caused a previous human outbreak; one or more coronaviruses isolated from animals selected from a group consisting of bats, pangolins, civet cats, minks, camels, and other animal receptive to coronaviruses; and/or one or more coronaviruses that cause the common cold. SARS-CoV-2 human strains and variants in current circulation may include the original SARS-CoV-2 strain (SARS-CoV-2 isolate Wuhan-Hu-1), and several variants of SARS-CoV-2 including but not limited to variant B.1.177 (Spain); variant B.1.160 (Australia), variant B.1.1.7 (UK), variant P.1 (Japan/Brazil), variant B.1,351 (South Africa), variant B.1.427 (California), variant B.1.429 (California), variant B.1.258 (Scotland); variant B.1.221 (Belgium/Netherlands); variant 8.1.367 (Norway/France); variant 8.1.1.277 (UK); variant 8.1.1.302 (Sweden); variant 8.1.525 (North America, Europe, Asia, Africa, and Australia); variant B.1.526 (New York), variant S:677H; variant S:677P; B.1.617.2-Delta, variant 8.1.1.529-Omicron (BA.1); sub-variant Omicron (BA.1); sub-variant Omicron (BA.2); sub-variant Omicron (BA.3); sub-variant Omicron (BA.4); sub-variant Omicron (BA.5). The present invention is not limited to the aforementioned variants of SARS-CoV-2 and encompasses variants identified in the future. The one or more coronaviruses that cause the common cold may include but are not limited to strains 229E (alpha coronavirus), NL63 (alpha coronavirus), OC43 (beta coronavirus), HKU1 (beta coronavirus).

[0228] As used herein, the term “conserved” refers to a large sequence that is among the most highly conserved large sequences identified in a sequence alignment and analysis. For example, the conserved large sequences may be the 2 most highly conserved sequences identified. In some embodiments, the conserved large sequences may be the 3 most highly conserved sequences identified. In some embodiments, the conserved large sequences may be the 4 most highly conserved sequences identified. In some embodiments, the conserved large sequences may be the 5 most highly conserved sequences identified. In some embodiments, the conserved large sequences may be the 6 most highly conserved sequences identified. In some embodiments, the conserved large sequences may be the 7 most highly conserved sequences identified, in some embodiments, the conserved large sequences may be the 8 most highly conserved sequences identified. In some embodiments, the conserved large sequences may be the 9 most highly conserved sequences identified. In some embodiments, the conserved large sequences may be the 10 most highly conserved sequences identified. In some embodiments, the conserved large sequences may be the 15 most highly conserved sequences identified. In some embodiments, the conserved large sequences may be the 20 most highly conserved sequences identified. In some embodiments, the conserved large sequences may be the 25 most highly conserved sequences identified. In some embodiments, the conserved large sequences may be the 30 most highly conserved sequences identified. In some embodiments, the conserved large sequences may be the 40 most highly conserved sequences identified. In some embodiments, the conserved large sequences may be the 50 most highly conserved sequences identified. In some embodiments, the conserved sequences may be the 50% most highly conserved large sequences identified. In some embodiments, the conserved large sequences may be the 60% most highly conserved sequences identified. In some embodiments, the large conserved sequences may be the 70% most highly conserved sequences identified. In some embodiments, the conserved large sequences may be the 80% most highly conserved sequences identified. In some embodiments, the conserved large sequences may be the 90% most highly conserved sequences identified. In some embodiments, the conserved large sequences may be the 95% most highly conserved sequences identified. In some embodiments, the conserved large sequences may be the 99% most highly conserved sequences identified. The present invention is not limited to the aforementioned thresholds.

[0229] FIG. 3A shows an example of a systems biology approach utilized in the present invention.

[0230] In some embodiments, the composition comprises one or more large sequences. In some embodiments, the one or more large sequences comprises at least one of one or more conserved coronavirus B-cell target epitopes; one or more conserved coronavirus CD4⁺ T cell target epitopes; and one or more conserved coronavirus CD8⁺ T cell target epitopes

[0231] In other embodiments, the vaccine composition comprises two or more large sequences. In some embodiments, the two or more large sequences comprises at least one of one or more conserved coronavirus B-cell target epitopes; one or more conserved coronavirus CD4⁺ T cell target epitopes; and one or more conserved coronavirus CD8⁺ T cell target epitopes

[0232] In some embodiments, the large sequences comprise one or more conserved coronavirus B-cell target epitopes and one or more conserved coronavirus CD4⁺ T cell target epitopes. In some embodiments, the large sequences comprise one or more conserved coronavirus B-cell target epitopes and one or more conserved coronavirus CD8⁺ T cell target epitopes. In some embodiments, the large sequences comprise one or more conserved coronavirus CD8⁺ target epitopes and one or more conserved coronavirus CD4⁺ T cell target epitopes. In some embodiments, the large sequences comprise one or more conserved coronavirus CD8⁺ target epitopes. In some embodiments, the large sequences comprise one or more conserved coronavirus CD4⁺ target epitopes. In some embodiments, the large sequences comprise one or more conserved coronavirus B cell target epitopes.

[0233] In some embodiments, the vaccine composition comprises one or more conserved coronavirus CDB8⁺ target epitopes. In some embodiments, the vaccine composition comprises one or more conserved coronavirus CD4⁺ target epitopes. In some embodiments, the vaccine composition comprises one or more conserved coronavirus B cell target epitopes.

[0234] As will be discussed herein, in certain embodiments, the vaccine composition comprises whole spike protein, one or more coronavirus CD4+ T cell target epitopes; and one or more coronavirus CD8+ T cell target epitopes. In certain embodiments, the vaccine composition comprises at least a portion of the spike protein (e.g., wherein the portion comprises a trimerized SARS-CoV-2 receptor-binding domain (RBD)), one or more coronavirus CD4+ T cell target epitopes; and one or more coronavirus CD8+ T cell target epitopes. In some embodiments, the one or more coronavirus CD4+ T cell target epitopes; and one or more coronavirus CD8+ T cell target epitopes may be in the form of a large sequence.

[0235] The large sequences may be each separated by a linker. In certain embodiments, the linker allows for an enzyme to cleave between the large sequences. The present invention is not limited to particular linkers or particular lengths of linkers. As an example, in certain embodiments, one or more large sequences may be separated by a linker 2 amino acids in length or a linker 3 amino acids in length, or a linker 4 amino acids in length, or a linker 5 amino acids in length, or a linker 6 amino acids in length, or a linker 7 amino acids in length, or a linker 8 amino acids in length, or a linker 9 amino acids in length, or a linker 10 amino acids in length. In certain embodiments, one or more large sequences may be separated by a linker from 2 to 10 amino acids in length.

[0236] Linkers are well known to one of ordinary skill in the art. Non-limiting examples of linkers include AAY, KK, and GPGPG.

[0237] The large sequences may be derived from structural proteins, non-structural proteins, or a combination thereof. For example, structural proteins may include spike proteins (S), envelope proteins (E), membrane proteins (M), or nucleoproteins (N).

[0238] In some embodiments, the large sequences are derived from at least one SARS-CoV-2 protein. The SARS-CoV-2 proteins may include ORF1ab protein, Spike glycoprotein, ORF3a protein, Envelope protein, Membrane glycoprotein, ORF6 protein, ORF7a protein, ORF7b protein, ORF8 protein, Nucleocapsid protein, and ORF10 protein. The ORF1ab protein provides nonstructural proteins (Nsp) such as Nsp1, Nsp2, Nsp3 (Papain-like protease), Nsp4, Nsp5 (3C-like protease), Nsp6, Nsp7, Nsp8, Nsp9, Nsp10, Nsp11, Nsp12 (RNA polymerase), Nsp13 (5′ RNA triphosphatase enzyme), Nsp14 (guanosineN7-methyltransferase), Nsp15 (endoribonuclease), and Nsp16 (2′O-ribose-methyltransferase).

[0239] The SARS-CoV-2 has a genome length of 29,903 base pairs (bps) ssRNA (SEQ ID NO: 1). Generally, the region between 266-21555 bps codes for ORF1ab polypeptide; the region between 21563-25384 bps codes for one of the structural proteins (spike protein or surface glycoprotein); the region between 25393-26220 bps codes for the ORF3a gene; the region between 26245-26472 bps codes for the envelope protein; the region between 26523-27191 codes for the membrane glycoprotein (or membrane protein); the region between 27202-27387 bps codes for the ORF6 gene: the region between 27394-27759 bps codes for the ORF7a gene; the region between 27894-28259 bps codes for the ORF8 gene; the region between 28274-29533 bps codes for the nucleocapsid phosphoprotein (or the nucleocapsid protein); and the region between 29558-29674 bps codes for the ORF10 gene.

[0240] The large sequences may comprise a T-cell epitope restricted to a large number of human class 1 and class 2 HLA haplotypes and not restricted to HLA-0201 for class 1 or HLA-DR for class 2. The conserved large sequences may be restricted to human HLA class 1 and 2 haplotypes. In some embodiments, the conserved epitopes are restricted to cat and dog MHC class 1 and 2 haplotypes.

### Large Sequences

[0241] The antigen may comprise large sequences, such as conserved large sequences that are highly conserved among human and animal coronaviruses. As used herein, the term large sequence refers to a sequence having at least 25 amino acids or at least 75 nucleotides. The large sequences comprise epitopes, such as the conserved epitopes described herein.

[0242] In some embodiments, the large sequence has at least 75 nt. In some embodiments, the large sequence has at least 150 nt. In some embodiments, the large sequence has at least 200 nt. In some embodiments, the large sequence has at least 250 nt. In some embodiments, the large sequence has at least 300 nt. In some embodiments, the large sequence has at least 400 nt. In some embodiments, the large sequence has at least 500 nt. In some embodiments, the large sequence has at least 600 nt. In some embodiments, the large sequence has at least 700 nt. In some embodiments, the large sequence has at least 800 nt. In some embodiments, the large sequence has at least 900 nt. In some embodiments, the large sequence has at least 1000 nt. In some embodiments, the large sequence has at least 1500 nt. In some embodiments, the large sequence has at least 2000 nt. In some embodiments, the large sequence has at least 2500 nt. In some embodiments, the large sequence has at least 3000 nt. In some embodiments, the large sequence has at least 3500 nt. In some embodiments, the large sequence has at least 4000 nt. In some embodiments, the large sequence has at least 4500 nt. In some embodiments, the large sequence has at least 5000 nt.

[0243] In order to identify the conserved large sequences, sequence alignments and analysis were performed as described herein as well as below.

[0244] Sequence comparison among SARS-CoV-2 and previous coronavirus strains: Sequence homology analysis we performed and compare the Severe acute respiratory syndrome coronavirus 2 (SARS-CoV-2) isolate Wuhan-Hu-1, to complete genome with sequences of SARS-CoV-2 variants, common cold corona virus strains (HKU1 genotype B, CoV-OC43, CoV-NL63, and CoV-229E), SARS-CoV-Urbani, MERS and coronavirus strains from bats (Rhinolophus affinis and R. malayanus), pangolin (Manis javanica), civet cats (Paguma larvata), and camel (Camelus dromedarius and C. bactrianus).

[0245] The human SARS-CoV-2 variant genome sequences were retrieved from the GISAID database, representing major Variants of Concern which are known for their high degree of transmissibility and pathogenicity. The sequences used in this study are 20A.EU1 from Spain (EPI_ISL_691726-hCoV-19-VOC-20A.EU1), 20A.EU2 from Australia (EPI_ISL_418799-hCoV-19-VOC-20A.EU2), B.1.1.7 from England (EPI_ISL_581117-hCoV-19-VOC-B.1.1.7), B.1.351 from South Africa (EPI_ISL_660615-hCoV-19-VOC-B.1.351), P.1 from Brazil (EPI_ISL_581117-hCoV-19-VOC-P.1), CAL.20C from California (EPI_ISL_730092-hCoV-19-VOC-B.1.427/B.1.429), B.1.258 from Scotland (EPI_ISL_858559-hCoV-19-VOC-B.1.258), B.1.221 from Belgium/Netherlands (EPI_ISL_734790-hCoV-19-VOC-B.1.221), B.1.367 from Norway/France (EPI_ISL_541518-hCoV-19-VOC-B.1.367), B.1.1.277 from Netherlands/Denmark/UK (EPI_ISL_500783-hCoV-19-VOC-B.1.1.277), B.1.1.302 from Sweden (EPI_ISL_717929-hCoV-19-VOC-B.1.1.302). Similarly, HKU1 genotype B (AY884001), CoV-OC43 (KF923903), CoV-NL63 (NC_005831), and CoV-229E (KY983587), SARS-CoV-Urbani (AY278741.1), MERS (NC_019843).

[0246] Bat CoV strains used in this analysis include strains RaTG13 (MN996532.2), Rs672/2006 (FJ588686.1), YNLF_31C (KP886808.1), WIV1 (KF367457.1), WIV16 (KT444582.1), ZXC21 (MG772934.1), RmYN02 (EPI_ISL_412977), bat-RmYN01 (EPI_ISL_412976), MERS-Bat-CoV/P. khulii/Italy/206645-63/2011 (MG596803.1). More-so, five genome sequences representing Pangolin (MT040333.1-PCoV_GX-P4L, MT040334.1-PCoV_GX-P1E, MT040335.1-PCoV_GX-P5L, MT040336.1-PCoV_GX-P5E, MT072864.1-PCoV_GX-P2V, MT121216.1-PCoV-MP789), three Civet cat specific genome sequences (AY572034.1, AY686864.1, AY686863.1), and four CoV sequences from camels (NC_028752.1, KF917527.1, MN514967.1, KT368891.1) were included in this sequence homology analysis aimed at evaluating the most conserved regions in different structural and non-structural proteins in CoV genome. These sequences were obtained either from National Center for Biotechnology Information (NCBI) or Global initiative on sharing all influenza data (GISAID). For phylogenetic analyses, SARS-CoV-2 full-genome sequences were aligned with CLUSTAL W using MEGAX. All the SARS-CoV-2 sequences were compared to existing genomes using online NCBI BLAST.

[0247] Determination of SARS-COV-2 Sequence Conservation: Each Wuhan-Hu-1 (GeneBank: NC_045512.2) specific structural (Spike glycoprotein (YP_009724390.1), Membrane protein (YP_009724393.1), Envelope protein (YP_009724392.1), Nucleocapsid phosphoprotein (YP_009724397.2)), and non-structural proteins (ORF1a/b polyprotein (YP_009724389.1), ORF3a (YP_009724391.1), ORF6 (YP_009724394.1), ORF7a (YP_009724395.1), ORF7b (YP_009725318.1), ORF8 (YP_009724396.1), and ORF10 (YP_009725255.1)) protein sequences were compared against the consensus protein sequences from SARSCoV and MERS-CoV and the protein sequences from closest relative cross species CoV strains using the Nucleotide BLAST (blastn) algorithm to compute the pairwise identity between Wuhan-Hu-1 proteins and their comparison target.

[0248] Further as the present invention is interested in the highly similar sequences across CoV strains, megablast was performed. For each of the queried sequences, Query coverage, E value. Percent identity were determined. The queried homology obtained against one bat CoV strain RmYN01, which was found earlier to be phylogenetically less similar to SARS-CoV-2, but has more genetic similarities with SARS-CoV-Urbani was taken as a standard to ascertain the homologous sequences across CoV strains. The strategy was helpful to find out how genetically more conserved regions among different CoVs. This sequence has a query coverage of 59%, and a percent identity of 78.73% when compared against the SARS-CoV-2 genome sequence. It has five matched regions which further showed sequence homology among other CoVs as well. Matched region 1 spanned between 1 bp-1580 bp (fragment) showed sequence homology with nsp1 (leader protein), nsp2, and nsp3, whereas matched region 2 spanned between 3547 bp-7096 bp (fragment 2) showed sequence homology with multiple subunits of ORF1a/b like 3CLpro, nsp6, nsp7, nsp8, nsp9, nsp10, RNA dependent RNA polymerase, helicase, nsp14, nsp15, and nsp16. Interestingly, a major region spanning in the non-annotated region of the ORF1a/b between 17472 bp-21156 bp (fragment 3) also showed sequence identity. The fourth stretch of sequence identity spanned through 22584 bp-24682 bp (fragment 4) covering a section of the Spike glycoprotein, that importantly covers the major Receptor Binding Domain in the SARS-CoV-2 as well. The last segment of the homologous sequence showed percent identity with regions specific to the ORF3a, Envelope protein, Membrane protein, ORF6, and ORF7a (26193 bp-27421 bp; fragment 5).

[0249] In some embodiments, five fragments from the SARS-CoV-2 Wuhan Strain were found to be highly conserved (1 bp-1580 bp (fragment 1), 3547 bp-12830 bp (fragment 2), 17472 bp-21156 bp (fragment 3), 22584 bp-24682 bp (fragment 4), and 26193 bp-27421 bp (fragment 5). Next, each fragment underwent another round of sequence homology analysis.

[0250] In some embodiments, the vaccine composition comprises one large sequence. In some embodiments, the vaccine composition comprises one or more large sequences. In some embodiments, the vaccine composition comprises two or more large sequences. In some embodiments, the vaccine composition comprises three or more large sequences. In some embodiments, the vaccine composition comprises four or more large sequences. In some embodiments, the vaccine composition comprises five or more large sequences, e.g., 5, 6, 7, 8, etc.

[0251] In some embodiments, the large sequences are derived from a whole protein sequence expressed by SARS-CoV-2. In other embodiments, large sequences are derived from a partial protein sequence expressed by SARS-CoV-2. In some embodiments, the large sequence of said proteins comprise B cell epitopes and T-cell epitopes that are restricted to a large number, e.g., from 3 to 10, different haplotypes that encompass 100% of the population regardless of race and ethnicity) of human class 1 and class 2 HLA haplotypes, so they are not restricted only to HLA-0201 for class 1 or HLA-DR1 for class 2.

[0252] As previously discussed, the large sequences may be highly conserved among human and animal coronaviruses. In some embodiments, the large sequences are derived from one or a combination of: one or more SARS-CoV-2 human strains or variants in current circulation; one or more coronaviruses that has caused a previous human outbreak; one or more coronaviruses isolated from animals selected from a group consisting of bats, pangolins, civet cats, minks, camels, and other animal receptive to coronaviruses; and/or one or more coronaviruses that cause the common cold.

[0253] As previously discussed, the SARS-CoV-2 human strains or variants in current circulation may include variant 6.1.177; variant B.1.160, variant 6.1.1.7 (UK), variant P.1 (Japan/Brazil), variant B.1.351 (South Africa), variant 8.1.427 (California), variant 6.1.429 (California), variant B.1.258; variant B.1.221; variant B.1.367; variant B.1.1.277; variant B.1.1.302; variant B.1.525; variant 6.1.526, variant S:677H; variant S:677P; B.1.617.2-Delta, variant B.1.1.529-Omicron (BA.1); sub-variant Omicron (BA.1); sub-variant Omicron (BA.2); sub-variant Omicron (BA.3); sub-variant Omicron (BA.4); sub-variant Omicron (BA.5). In some embodiments, the one or more coronaviruses that cause the common cold are selected from 229E alpha coronavirus, NL63 alpha coronavirus, OC43 beta coronavirus, and HKU1 beta coronavirus.

[0254] The large sequence(s) may be derived from structural proteins, non-structural proteins, or a combination thereof. The large sequence(s) may be selected from ORF1ab protein, Spike glycoprotein (e.g., the RBD), ORF3a protein, Envelope protein, Membrane glycoprotein, ORF6 protein, ORF7a protein, ORF7b protein, ORF8 protein, Nucleocapsid protein, and/or an ORF10 protein. Note the ORF1ab protein comprises nonstructural protein (Nsp) 1, Nsp2, Nsp3, Nsp4, Nsp5, Nsp6, Nsp7, Nsp8, Nsp9, Nsp10, Nsp11, Nsp12, Nsp13, Nsp14, Nsp15 and Nsp16.

[0255] In some embodiments, a large sequence comprises conserved fragments from over 150,000 CoV strains circulating in the majority of countries around the world (Table 1, FIG. 4). In some embodiments, fragment 1 comprises the base pairs 1-1580. In some embodiments, fragment 1 may comprise the proteins Nsp1, Nsp2, and Nsp3 as well as unannotated regions (FIG. 5). In some embodiments, fragment 2, comprises the base pairs 3547-12830. In some embodiments, fragment 2 may comprise the proteins Nsp5, Nsp6, Nsp7, Nsp8, Nsp9, Nsp10, Nsp11, Nsp12, Nsp13, Nsp14, Nsp15, Nsp16, as well as unannotated regions (FIG. 6). In some embodiments, fragment 3 comprises the base pairs 17472-21156. In some embodiments, fragment 3 comprises unannotated regions (FIG. 7). In some embodiments, fragment 4 comprises the base pairs 22584-24682. In some embodiments, fragment 4 comprises the spike glycoprotein (FIG. 8). In some embodiments, fragment 5 comprises the base pairs 26193-27421. In some embodiments, fragment 5 comprises the proteins ORF3a, Envelope (E), Membrane (M), ORF6, ORF7a, as well as unannotated regions (FIG. 9).

TABLE 1

| | | | SEQ |
|---|---|---|---|
| Fragment | | | ID |
| No: | Proteins | Sequence | NO: |
| 1 | Nspt | GACGTGCTAGTACGTGGCTTCGGGGACTCTGTGGAAGAGGCCCTA | 182 |
| (1 bp- | Nsp2, | TCGGAGGCACGTGAACATCTTAAAAGTGGCACTTGTGGCATAGTAG | |
| 1580 bp) | Nsp3 | AGCTGGAAAAAGGCGTATTGCCTCAGCTTGAACAGCCCTATGTGTT | |
| | | CATTAAACGATCTGACGCCCAGGGCACTGGTCATGGCCACAAGGT | |
| | | CTGTGAGCTAGTTGCTGAATTGGATGGCGTTCAGTTCGGTCGTAGC | |
| | | GGTATAACACTGGGAGTACTCGTGCCACACGTTGGCGAGACCCCA | |
| | | ATTGCATACCGCACTGTTCTTCTTCGTAAGAATGGTAATAAGGGAGC | |
| | | CGGTGGCCATAGCTTTGGCATCGATCTAAAGTCATATGACTTAGGT | |
| | | GACGAGCTTGGCACTGATCCCATTGAAGATTATGAACAAAACTGGA | |
| | | ACACTAAACATGGCAGTGGTGCCCTTCGTGAACTCACTCGTGAGCT | |
| | | CAATGGAGGAGTAGTTACTCGCTATGTCGACAACAATTTCTGTGGC | |
| | | CCAGATGGCTACCCCCTTGAATGCATTAAAGACCTTCTCGCTCGTG | |
| | | CGGGCAAGTCAATGTGCACTCTTTCTGAACAACTTGATTATCGAG | |
| | | TCGAAGAGAGGTGTCTACTGCTGTCGTGAACATGAGCATGAAATTG | |
| | | CTTGGTTTACCGAACGCTCTGAAAAGAGCTATGAGCACCAGACACC | |
| | | CTTCGAGATCAAGAGTGCCAAGAAATTTGACACTTTCAAAGGGGAA | |
| | | TGCCCAAAGTTTGTATTTCCTCTCAATTCTAGAGTCAAAGTCATTCA | |
| | | ACCACGTGTTGAAAAGAAAAAGACTGAAGGTTTCATGGGGCGTATA | |
| | | CGCTCTGTGTACCCTGTTGCATCCCCTGGGGATTGTAACGATATGC | |
| | | ACTTGTCTACCTTGATGAAATGTAATCATTGTGATGAAGTTTCATGG | |
| | | CAGACGTGCGACTTTCTCAAAGCCACTTGTGAACAATGTGGCACTG | |
| | | AAAACTTAGTCTGTGAAGGACCCACTACATGTGGATACCTACCTACT | |
| | | AATGCTGTACTTAAAATGCCTTGTCCTGCTTGTCAAGATCCAGAGAT | |
| | | TGGACCTGAGCATAGTGTTGCAGACTATCACAACCACTCAAACATT | |
| | | GAAACTCGACTCCGCAAGGGAGGTAGGACTAAATGTTTTGGTGGGT | |
| | | GTGTGTTTGCCTACGTTGGCTGCTATAACAAGCGTGCCTACTGGGT | |
| | | TCCTCGTGCTAGTGCCGATATTGGTGCAAACCATACTGGCATTACT | |
| | | GGAGACAATGTGGAGACTTTAAATGAAGATCTCCTGGAGATACTGC | |
| | | ATCGTGAACGTGTTAATGTTAACATTGTTGGCGATTTTCAGTTGAAT | |
| | | GAAGAGGTTGCTATTATTCTAGCATCTTTCTCTGCTTCTACTAGTGC | |
| | | CTTTATTGACACTGTAAAGGGCCTTGACTACAAGACCTTCAAAGCCA | |
| | | TTGTTGAATCCTGTGGAAACTACAAAGTTACCAAAGGAAAACCTGTC | |
| | | CAAGGAGCTTGGAACATTGGCCAGCAAAAATCTATTTTGACACCGC | |
| | | TGTGTGGTTTTCCATCACAGGCTGCCAGTGTCATTAGATCAATCTTT | |
| | | TCTCGCAC | |
| 2 | Nsp5_{,} | AAAATTAAGGCTTGCATCGAAGAGGTCACTACAACACTGGAAGAGA | 183 |
| (2547 bp- | Nsp6, | CTAAGTTTCTTACCAATAAGTTGCTTCTTTTTGCTGATATCAGCGGTA | |
| 12830 bp) | Nsp7, | AACTTTACCAAGATTCTCAGAATATGCTTAGAGGTGAGGACGTGTCT | |
| | Nsp8, | TTCCTTGAGAGAGATGCGCCTTACATGGTAGGTGATGTTATCAATA | |
| | Nsp9, | GTGGTGATATTACCTGCGTTGTAATACCTTCTAAGAAGGCTGGTGG | |
| | Nsp10, | TACTACAGAAATGCTTGCAAGAGCATTGAAGAAAGTGCCARTTGAT | |
| | Nsp11, | GAGTATATAACCACATAYCCTGGWCAAGGWTGTGCTGGTTATACAC | |
| | Nsp12, | TTGAKGAAGCTARGACTGCTCTTAARAARTGCAAATCTGCAYTKTAY | |
| | Nsp13, | GTKTTACCTTCAGAATCACCTAATGCTAAGGAAGAGATTCTAGGAAC | |
| | Nsp14, | CGTATCTTGGAATTTGAGAGAAATGCTTGCTCACGCTGAAGAGACA | |
| | Nsp15, | AGAAAATTAATGCCTATCTGCATGGATGTCAGAGCCATAATGGCCA | |
| | Nsp16 | CCATCCAACGCAAGTACAAAGGAATTAAAATTCAAGAAGGCATCGTT | |
| | | GACTATGGTGTCCGATTCTTCTTTTATACTAGTAAAGAGCCTGTAGC | |
| | | TTCTATTATTACGAAGCTGAACTCTCTAAATGAGCCACTTGTCACAA | |
| | | TGCCAATTGGTTATGTGACACATGGTTTTAATCTTGAAGAGGCTGCG | |
| | | CGCTGTATGCGTTCTCTTAAAGCTCCTGCCGTAGTGTCAGTATCATC | |
| | | ACCAGATGCYGTTACTACATATAATGGATACCTCACTTCGTCATCAA | |
| | | AGACATCTGAGGAGCACTTTGTGGAAACAGTTTCTTTGGCTGGCTC | |
| | | TTACAGAGATTGGTCCTATTCAGGACAGCGTACAGAGTTAGGTGTT | |
| | | GAATTTCTTAAGCGTGGTGACAAAATTGTGTACCACACTTTGGAGAG | |
| | | CCCCGTCAAGTTCCATCTTGACGGTGAGGTTCTTCCACTTGACAAA | |
| | | TTAAAGAGTCTCTTATCCCTACGGGAGGTTAAGACTATAAAAGTGTT | |
| | | CACAACTGTGGACAATACTAATCTCCACACACATCTTGTGGATATGT | |
| | | CTATGACATATGGACAGCAGTTTGGTCCAACATATTTGGATGGTGCT | |
| | | GATGTTACAAAAATTAAACCTCATGTAAATCATGAGGGTAAGACTTT | |
| | | CTTTGTATTACCTAGTGATGACACACTACGTAGTGAAGCTTTTGAGT | |
| | | ACTACCACGCTCTTGATGAGAGTTTCCTTGGTAGATACATGTCTGCT | |
| | | TTAAACCACACAAAGAAATGGAAATTCCCTCAAGTTGGTGGTTTGAC | |
| | | TTCCATTAAGTGGGCTGATAACAATTGTTATTTGTCTAGTGTTTTATT | |
| | | AGCACTTCAACAAATTGAAGTTAAATTTAATGCCCCAGCACTACAAG | |
| | | AAGCTTACTATAGAGCTCGTGCTGGTGATGCTGCTAATTTTTGTGCA | |
| | | CTTATACTCGCTTACAGTAATAAAACTGTTGGCGAGCTGGGTGATGT | |
| | | CAGAGAAACTATGGCCCATCTTTTACAGCATGCTAATTTGGAATCTG | |
| | | CAAAGCGAGTTCTTAATGTGGTGTGTAAACATTGCGGCCAGAAAAC | |
| | | TACTACCTTAACGGGTGTAGAGGCTGTGATGTACATGGGTACTCTG | |
| | | TCTTATGATAATCTTAAGACAGGTGTTTCTGTTCCATGTGTGTGTGG | |
| | | TCGTGACGCTACACAATATTTAGTACAACAAGAGTCTTCTTTTGTTAT | |
| | | GATGTCCGCACCACCTGCTGAATATAAATTACAGCAAGGTACATTCT | |
| | | TATGTGCAAATGAATACACTGGTAATTATCAGTGTGGTCATTACACT | |
| | | CATATAACTGCTAAGGAGACCCTCTATCGTATTGATGGAGCTCACCT | |
| | | TACAAAGATGTCAGAGTATAAAGGGCCAGTGACTGATGTGTTCTAC | |
| | | AAGGAAACATCTTACACTACAACCATCAAGCCTGTGTCATATAAACT | |
| | | CGATGGAGTTACTTACACAGAGATTGAACCAAAATTGGATGGGTATT | |
| | | ATAAAAAGGATAATGCTTACTATACGGAGCAGCCTATAGACCTTGTA | |
| | | CCAACTCAACCACTACCAAATGCGAGTTTTGATAATTTCAAACTCAC | |
| | | ATGTTCTAATATAAAATTCGCTGATGATTTAAATCAAATGACAGGCTT | |
| | | CACAAAGCCAGCTTCACGAGAGCTATCTGTCACATTCTTTCCAGACT | |
| | | TGAATGGCGATGTAGTGGCTATTGACTATAGACACTACTCAGCGAG | |
| | | TTTCAAGAAAGGTGCTAGATTACTGCATAAGCCAATTGTTTGGCATA | |
| | | TCAATCAGGCTACAACCAAGACAACGTTCAGACCAAACACTTGGTG | |
| | | TTTACGTTGTCTTTGGAGTACAAAACCAGTAGATACTTCAAATTCATT | |
| | | TGAAGTTCTGGCAGTAGAAGACACACAAGGAATGGACAATCTTGCT | |
| | | TGTGAAAGTCAAAGACCCACCTCTGAAGAAGTAGTGGAAAATCCTA | |
| | | CCATACAGAAGGAAGTCATAGAGTGTGACGTGAAAACTACCGAAGT | |
| | | TGTAGGCAATGTCATACTTAAACCATCAGATGAAGGTGTTAAAGTAA | |
| | | CACAAGAGTTAGGGCATGAGGATCTTATGGCTGCCTATGTGGAAAA | |
| | | TACAAGCATTACCATTAAGAAACCTAATGAGCTTTCATTAGCCTTAG | |
| | | GTTTAAAAACAATTGCCACTCATGGTATTGCTGCAATTAACAGTGTT | |
| | | CCGTGGAGTAAAATTTTGGCTTATGTCAGACCATTCCTAGGACGAA | |
| | | CAGCAATCACAACATCAAACTGTGCTAAGAGATTAGTACAGCGTGT | |
| | | ATTTAACAACTACATGCCCTATGTGCTTACATTATTGTTCCAATTGTG | |
| | | TAGTTTTACCAAAAGTACAAATTCTAGAATTAGAGCTTCACTACCTAC | |
| | | GACTATTGCTAAAAATAGTGTTAAGGGTGTTGCTAAATTATGTTTGG | |
| | | ATGCTGGCATCAATTATGTAAAGTCACCCAAATTTTCTAAATTGTTCA | |
| | | CTATTGCAATGTGGCTATTATTGTTAAGCATTTGCTTAGGTTCACTAA | |
| | | TCTATGTAACTGCAGCTTTAGGTGTATTATTGTCCAACTTTGGAGCT | |
| | | CCTTCCTATTGTAGTGGCGTTAGAGAATCGTATCTCAATTCCTCTAA | |
| | | TGTTACTACTATGGACTTCTGTGAAGGTTCTTTTCCTTGCAGCGTTT | |
| | | GTTTAAGTGGATTAGACTCGCTTGATTCCTATCCAGCTCTTGAAACC | |
| | | ATACAGGTAACGATTTCATCGTATAAGCTAGACTTGACAATTTTAGG | |
| | | TCTGGCTGCTGAGTGGTTTTTGGCATATATGTTGTTCACAAAATTCT | |
| | | TTTATTTATTAGGTCTTTCAGCTATAATGCAGGTGTTCTTTGGCTATT | |
| | | TTGCTAGTCATTTCATCAGCAATTCTTGGCTTATGTGGTTTATCATTA | |
| | | GTATCGTACAAATGGCACCCGTTTCCGCAATGGTTAGGATGTACAT | |
| | | TTTCGTTGCTTCTTTCTACTACATATGGAAGAGCTATGTTCATATTAT | |
| | | GGATGGTTGTACTTCATCTACTTGCATGATGTGCT | |
| 4 | spike | TACCAAGCTACTAGAGTAGTGGTACTTTCATTTGAGCTTCTAAATGC | 184 |
| (22584 bp- | glyco- | ACCTGCCACAGTGTGTGGACCAAAATTGTCCACATCACTAATTAAGA | |
| 24683 bp) | protein | ACCAGTGTGTCAATTTTAATTTCAATGGACTCAAGGGTACTGGTGTG | |
| | | TTGACTGACTCGTCCAAAAAGTTTCAGTCTTTTCAACAATTTGGAAG | |
| | | GGATGCATCTGATTTTACTGACTCAGTACGCGACCCTCAGACACTT | |
| | | CAAATACTTGACATTTCACCATGTTCATTTGGTGGTGTGAGTGTAAT | |
| | | AACACCAGGAACAAATGCTTCATCTGAAGTAGCCGTTCTATACCAA | |
| | | GATGTAAACTGCACTGATGTTCCCACGGCCATACGTGCTGACCAAC | |
| | | TCACACCTGCTTGGCGTGTTTACTCTGCTGGAGTAAATGTGTTTCAA | |
| | | ACTCAGGCTGGCTGTTTAATAGGAGCGGAACATGTCAATGCTTCAT | |
| | | ATGAGTGTGACATTCCCATTGGTGCAGGCATTTGTGCTAGTTACCAT | |
| | | ACAGCTTCCCTTTTACGTAATACAGGCCAGAAATCAATTGTGGCCTA | |
| | | TACTATGTCACTTGGTGCTGAAAACTCAATTGCTTATGCTAATAACT | |
| | | CAATTGCCATACCTACAAATTTTTCAATCAGTGTCACAACTGAAGTG | |
| | | ATGCCTGTTTCAATGGCTAAGACATCAGTAGATTGTACAATGTACAT | |
| | | CTGTGGTGACTCTCAGGAGTGCAGCAACTTACTACTTCAGTATGGT | |
| | | AGCTTTTGCACACAATTAAATCGTGCCCTTTCAGGCATTGCTGTTGA | |
| | | ACAGGACAAAAACACTCAAGAGGTTTTTGCCCAAGTTAAACAAATGT | |
| | | ATAAGACACCAGCCATAAAAGATTTTGGTGGCTTTAATTTCTCACAA | |
| | | ATATTGCCTGACCCTTCTAAGCCAACAAAAAGATCATTTATTGAGGA | |
| | | TTTACTCTTCAACAAAGTGACTCTCGCTGATGCTGGCTTTATGAAGC | |
| | | AATACGGCGAATGCCTAGGCGATATTAGTGCTAGAGATCTCATTTG | |
| | | TGCGCAGAAGTTCAATGGACTCACTGTCCTTCCACCTCTACTCACG | |
| | | GATGAAATGATTGCTGCTTACACCGCCGCTCTTGTCAGCGGTACTG | |
| | | CTACTGCTGGTTGGACATTTGGTGCAGGTGCTGCTCTACAAATACC | |
| | | TTTTGCTATGCAAATGGCTTATAGGTTCAATGGCATTGGAGTTACTC | |
| | | AAAATGTTCTCTATGAGAACCAGAAGCAGATCGCTAACCAATTTAAC | |
| | | AAGGCGATCAGTCAAATTCAAGAATCACTTACTACTACTTCAACTGC | |
| | | ATTGGGCAAGCTGCAAGACGTCGTCAACCAGAATGCTCAAGCATTG | |
| | | AACACACTTGTTAAACAACTAAGTTCTAACTTTGGTGCAATTTCAAGT | |
| | | GTTTTAAATGACATTCTGTCTCGACTYGACAAAGTTGAGGCTGAAGT | |
| | | GCAAATTGATAGGTTGATTACTGGCAGATTACAAAGCCTTCAGACCT | |
| | | ATGTAACACAACAACTAATCAGAGCTGCTGAAATCAGAGCTTCTGC | |
| | | CAATCTTGCTGCCACTAAGATGTCCGAGTGTGTTCTTGGACAATCAA | |
| | | AAAGAGTTGACTTTTGTGGAAAAGGCTATCATCTTATGTCTTTCCCT | |
| | | CAAGCAGCCCCACATGGTGTCGTCTTCTTACATGTCACATACGTGC | |
| | | CATCGCAAGAAAGAAACTTCACCACTGCCCCAGCAATCTGCCATCA | |
| | | AGGCAAGGCACACTTCCCTCGTGAAGGTGTTTTTGTATCTAATGGC | |
| | | ACTTCTTGGTTTATCACACAGAGGAACTTCTTCACCACAAATAATT | |
| | | ACAACAGACAATACATTTGTCTCTGGAAATTGTGATGTCGTTATTGG | |
| | | CATCATCAACAATACTGTTTATGATCCTCTGCAACCTGAGCTTGACT | |
| | | CATTTAAAGAAGAGCTGGACAAGTACTTCAAAAACCACACGTCACCT | |
| | | GATGTRGATCTTGGCGACATCTCAGGCATTAATGCTTCAGTCGTCA | |
| | | ATATTCAAAAAGAAATTGACCGCCTCAATGAGGTTGCCAAAAATCTA | |
| | | AATGAATCGCTCATCGATCTTCAAGAACTTGGAAAATATGAGCA | |
| 5 | ORF3a, | CAGTAACACTTGCTTGCTTTGTGCTTGCTGCTGTTTACAGAATTAAT | 185 |
| (26193 bp- | Envelope | TGGGTGACTGGCGGAATTGCRATTGCAATGGCTTGTATTGTAGGCT | |
| 27421 bp) | (E), | TGATGTGGCTTAGCTACTTCRTTGCTTCTTTCAGGCTGTTTGCGCGC | |
| | Membrane | ACCCGCTCWATGTGGTCATTCAACCCAGAAACYAACATTCTTCTCA | |
| | (M), ORF6, | ATGTGCCTCTTCGRGGRACAATYTTGACCAGACCGCTCATGGARAG | |
| | ORF7a | TGAACTTGTCATTGGTGCTGTGATCATTCGTGGTCACCTGCGAATG | |
| | | GCTGGACACTCYCTWGGGCGCTGTGACATTAAGGACCTGCCAAAA | |
| | | GAGATCACTGTGGCTACATCACGAACGCTTTCTTATTACAAATTAGG | |
| | | AGCTTCGCAGCGTGTAGGCACTGACTCAGGTTTTGCTGCATACAAC | |
| | | CGCTACCGTATTGGAAACTACAAATTAAATACAGACCACGCCGGTA | |
| | | GCAACGACAATATTGCTTTGCTAGTACAGTAAGTGACAACAGATGTT | |
| | | TCATCTAGTTGACTTCCAGGTTACAATAGCGGAGATATTGATTATCA | |
| | | TTATGAGGACTTTCAGGATTGCCATCTGGAATCTTGATGTAATAATA | |
| | | AGTTCAATAGTGAGACAATTATTTAAGCCTCTAACTAAGAAGAATTAT | |
| | | TCTGAGTTAGATGATGAAGAACYTATGGAGATTGATTATCCATAAAA | |
| | | CGAACATGAAAATTATCCTCTTCCTGACTTTGATTTCACTTGCATTTT | |
| | | GTGAGTTATATCATTATCAGGAGTGTGTTAGAGGTACAACTGTACTA | |
| | | TTAAAAGAACCTTGCCCATCRGGAACGTACGAGGGCAATTCACCAT | |
| | | TTCACCCTCTTGCTGACAACAAATTTGCACTAACTTGCATTAGCACA | |
| | | CATTTTGCTTTTGCTTGTGCTGACGGTACTCGACATACCTATCAGCT | |
| | | TCGTGCAAGATCAGTTTCTCCAAAACTCTTCATCAGGCAAGAGGAAT | |
| | | TTCATCAAGAGCTCTATTCACCACTTTTTCTCATTGTTGCCGCTCTA | |
| | | GTATTTATAATACTTTGCTTCACCATTAAGAGAAAGACCGAATGAGT | |
| | | GAGCTCACTTTAATTGACTTCTATTTGTGCTTTAGCCTTTCTGCTA | |
| | | TTCCTTGTTTTAATAATGCTCATCATATTTTGGTTCTCCTTGGAGATT | |
| | | CAAGATTCTGAAGAGCCATGTCCAAAAGTCTAAACGAACATGAAACT | |
| | | TCTCATTGTTTT | |
| 6 | Nsp2 | ATGGCATACACTCGCTATGTCGATAACAACTTCTGTGGCCCTGATG | 360 |
| | | GCTACCCTCTTGAGTGCATTAAAGACCTTCTAGCACGTGCTGGTAA | |
| | | AGCTTCATGCACTTTGTCCGAACAACTGGACTTTATTGACACTAAGA | |
| | | GGGGTGTATACTGCTGCCGTGAACATGAGCATGAAATTGCTTGGTA | |
| | | CACGGAACGTTCTGAAAAGAGCTATGAATTGCAGACACCTTTGAA | |
| | | ATTAAATTGGCAAAGAAATTTGACACCTTCAATGGGGAATGTCCAAA | |
| | | TTTTGTATTTCCCTTAAATTCCATAATCAAGACTATTCAACCAAGGGT | |
| | | TGAAAAGAAAAAGCTTGATGGCTTTATGGGTAGAATTCGATCTGTCT | |
| | | ATCCAGTTGCGTCACCAAATGAATGCAACCAAATGTGCCTTTCAACT | |
| | | CTCATGAAGTGTGATCATTGTGGTGAAACTTCATGGCAGACGGGCG | |
| | | ATTTTGTTAAAGCCACTTGCGAATTTTGTGGCACTGAGAATTTGACT | |
| | | AAAGAAGGTGCCACTACTTGTGGTTACTTACCCCAAAATGCTGTTGT | |
| | | TAAAATTTATTGTCCAGCATGTCACAATTCAGAAGTAGGACCTGAGC | |
| | | ATAGTCTTGCCGAATACCATAATGAATCTGGCTTGAAAACCATTCTT | |
| | | CGTAAGGGTGGTCGCACTATTGCCTTTGGAGGCTGTGTGTTCTCTT | |
| | | ATGTTGGTTGCCATAACAAGTGTGCCTATTGGGTTCCACGTGCTAG | |
| | | CGCTAACATAGGTTGTAACCATACAGGTGTTGTTGGAGAAGGTTCC | |
| | | GAAGGTCTTAATGACAACCTTCTTGAAATACTCCAAAAAGAGAAAGT | |
| | | CAACATCAATATTGTTGGTGACTTTAAACTTAATGAAGAGATCGCCA | |
| | | TTATTTTGGCATCTTTTTCTGCTTCCACAAGTGCTTTTGTGGAAACTG | |
| | | TGAAAGGTTTGGATTATAAAGCATTCAAACAAATTGTTGAATCCTGT | |
| | | GGTAATTTTAAAGTTACAAAAGGAAAAGCTAAAAAAGGTGCCTGGAA | |
| | | TATTGGTGAACAGAAATCAATACTGAGTCCTCTTTATGCATTTGCAT | |
| | | CAGAGGCTGCTCGTGTTGTACGATCAATTTTCTCCCGCACTCTTGA | |
| | | AACTGCTCAAAATTCTGTGCGTGTTTTACAGAAGGCCGCTATAACAA | |
| | | TACTAGATGGAATTTCACAGTATTCACTGAGACTCATTGATGCTATG | |
| | | ATGTTCACATCTGATTTGGCTACTAACAATCTAGTTGTAATGGCCTA | |
| | | CATTACAGGTGGTGTTGTTCAGTTGACTTCGCAGTGGCTAACTAAC | |
| | | ATCTTTGGCACTGTTTATGAAAAACTCAAACCCGTCCTTGATTGGCT | |
| | | TGAAGAGAAGTTTAAGGAAGGTGTAGAGTTTCTTAGAGACGGTTGG | |
| | | GAAATTGTTAAATTTATCTCAACCTGTGCTTGTGAAATTGTCGGTGG | |
| | | ACAAATTGTCACCTGTGCAAAGGAAATTAAGGAGAGTGTTCAGACA | |
| | | TTCTTTAAGCTTGTAAATAAATTTTTGGCTTTGTGTGCTGACTCTATC | |
| | | ATTATTGGTGGAGCTAAACTTAAAGCCTTGAATTTAGGTGAAACATT | |
| | | TGTCACGCACTCAAAGGGATTGTACAGAAAGTGTGTTAAATCCAGA | |
| | | GAAGAAACTGGCCTACTCATGCCTCTAAAAGCCCCAAAAGAAATTAT | |
| | | CTTCTTAGAGGGAGAAACACTTCCCACAGAAGTGTTAACAGAGGAA | |
| | | GTTGTCTTGAAAACTGGTGATTTACAACCATTAGAACAACCTACTAG | |
| | | TGAAGCTGTTGAAGCTCCATTGGTTGGTACACCAGTTTGTATTAACG | |
| | | GGCTTATGTTGCTCGAAATCAAAGACACAGAAAAGTACTGTGCCCT | |
| | | TGCACCTAATATGATGGTAACAAACAATACCTTCACACTCAAAGGCG | |
| | | GTTGATGA | |
| 7 | Nsp2 | ATGGCCTATACCAGGTACGTGGATAATAATTTCTGTGGGCCTGACG | 361 |
| | (codon | GCTACCCTCTGGAATGCATCAAAGACCTGTTGGCTAGGGCAGGAAA | |
| | optimized) | AGCTTCATGCACCCTGTCTGAGCAACTTGACTTCATTGACACAAAG | |
| | | CGGGGAGTCTACTGCTGCCGCGAACATGAGCACGAGATTGCTTGG | |
| | | TACACAGAGCGAAGCGAAAAATCTTATGAACTGCAGACACCCTTTG | |
| | | AAATCAAGTTAGCAAAGAAGTTCGACACCTTTAATGGCGAGTGCCC | |
| | | AAACTTTGTGTTCCCTCTGAATTCGATCATTAAAACCATCCAGCCTA | |
| | | GAGTAGAAAAAAAAAAGCTCGATGGTTTCATGGGCCGCATAAGATC | |
| | | TGTGTATCCTGTGGCTAGCCCCAACGAGTGTAACCAGATGTGTTTG | |
| | | TCAACCCTGATGAAATGTGATCACTGTGGAGAAACGAGTTGGCAGA | |
| | | CTGGAGACTTTGTTAAAGCTACTTGCGAATTCTGCGGGACAGAGAA | |
| | | CCTCACCAAGGAGGGAGCAACCACGTGCGGTTACCTGCCCCAAAA | |
| | | TGCTGTAGTCAAAATCTACTGTCCGGCATGCCATAACTCAGAGGTT | |
| | | GGGCCAGAGCATAGCTTGGCAGAGTACCATAATGAATCGGGACTTA | |
| | | AAACAATCCTGCGGAAGGGTGGCCGTACGATTGCCTTTGGAGGGT | |
| | | GCGTCAGCTATGTGGGCTGCCACAACAAGTGCGCCTACTGGGT | |
| | | GCCCAGAGCCAGTGCCAACATTGGATGTAACCACACAGGCGTCGT | |
| | | TGGGGAGGGCAGTGAGGGCTTGAATGACAATCTTCTGGAGATTCTA | |
| | | CAAAAGGAAAAGGTCAACATCAACATAGTTGGGGATTTCAAGCTGA | |
| | | ACGAGGAGATTGCCATCATTTTAGCGTCCTTTTCTGCCTCAACAAGT | |
| | | GCCTTCGTGGAAACTGTGAAAGGGCTTGACTACAAGGCATTTAAGC | |
| | | AGATCGTGGAGTCCTGTGGCAACTTTAAAGTGACTAAGGGCAAGGC | |
| | | CAAAAAGGGGGCCTGGAATATAGGCGAACAGAAGTCCATCCTGAG | |
| | | CCCTCTCTATGCTTTTGCTAGTGAAGCTGCCCGCGTTGTCCGGTCT | |
| | | ATCTTCAGCCGAACTTTGGAGACTGCTCAGAACTCTGTCAGAGTCC | |
| | | TGCAGAAGGCAGCCATTACCATACTTGATGGGATATCTCAATACAG | |
| | | CCTCCGTCTGATTGATGCCATGATGTTTACTTCAGATCTCGCAACCA | |
| | | ACAATCTCGTTGTGATGGCTTATATCACTGGGGGTGTGGTACAGCT | |
| | | GACGTCCCAGTGGCTGACTAATATATTCGGGACCGTATATGAGAAG | |
| | | CTCAAGCCAGTGCTGGACTGGCTGGAAGAGAAATTCAAGGAAGGT | |
| | | GTGGAATTTTTGAGGGACGGCTGGGAGATTGTGAAGTTTATTAGCA | |
| | | CCTGTGCATGTGAGATTGTTGGCGGACAGATCGTGACATGTGCTAA | |
| | | GGAAATAAAAGAGAGTGTACAAACGTTCTTCAAACTCGTGAATAAAT | |
| | | TTTTAGCGCTATGTGCTGACTCCATCATAATTGGCGGAGCCAAGTTA | |
| | | AAAGCGCTCAACTTGGGAGAGACATTTGTCACCCACTCCAAAGGTC | |
| | | TGTATAGGAAGTGTGTAAAGTCCAGAGAGGAGACTGGACTACTAAT | |
| | | GCCACTGAAGGCTCCCAAAGAGATCATCTTCTTAGAAGGAGAGACA | |
| | | CTTCCGACTGAGGTCCTTACAGAAGAAGTGGTCCTCAAAACTGGTG | |
| | | ATCTCCAGCCCCTAGAGCAGCCCACATCCGAGGCAGTCGAAGCCC | |
| | | CACTGGTGGGCACACCTGTGTGCATCAATGGACTCATGTTACTCGA | |
| | | AATCAAGGATACCGAGAAGTACTGCGCACTGGCCCCTAACATGATG | |
| | | GTAACCAATAACACATTCACCCTGAAAGGTGGTTGATAA | |
| 8 | Nsp3 | ATGCTCTTGTTAGTGACATTGACATCACTTTCTTAAAGAAAGATGCT | 362 |
| | | CCATATATAGTGGGTGATGTTGTTCAAGAGGGTGTTTTAACTGCTGT | |
| | | GGTTATACCTACTAAAAAGGCTAGTGGCACTACTGAAATGCTAGCG | |
| | | AAAGCTTTGAGAAAAGTGCCAACAGACAATTATATAACCACTTACCC | |
| | | GGGTCAGGGTTTAAATGGTTACACTGTAGAGGAGGCAAAGACAGTG | |
| | | CTTAAAAAGTGTAAAAGTGCTTTTTACATTCTACCATCTATTATCTCT | |
| | | AATGAGAAGCAAGAAATTCTTGGAACTGTTTCTTGGAATTTGCGAGA | |
| | | AATGCTTGCACATGCAGAAGAAACACGCAAATTAATGCCTGTCTGT | |
| | | GTGGAAACTAAAGCCATAGTTTCAACTATACAGCGTAAATATAAGGG | |
| | | TATTAAAATACAAGAGGGTGTGGTTGATTATGGTGCTAGATTTTACT | |
| | | TTTACACCAGTAAAACAACTGTAGCGTCACTTATCAACACACTTAAC | |
| | | GATCTAAATGAAACTCTTGTTACAATGCCACTTGGCTATGTAACACA | |
| | | TGGCTTAAATTTGGAAGAAGCTGCTCGGTATATGAGATCTCTCAAAG | |
| | | TGCCAGCTACAGTTTCTGTTTCTTCACCTGATGCTGTTACAGCGTAT | |
| | | AATGGTTATCTTACTTCTTCTTCTAAAACACCTGAAGAACATATT | |
| | | GAAACCATCTCACTTGCTGGTTCCTATAAAGATTGGTCCTATTCTGG | |
| | | ACAATCTACACAACTAGGTATAGAATTTCTTAAGAGAGGTGATAAAA | |
| | | GTGTATATTACACTAGTAATCCTACCACATTCCACCTAGATGGTGAA | |
| | | GTTATCACCTTTGACAATCTTAAGACACTTCTTTCTTTGAGAGAAGT | |
| | | GAGGACTATTAAGGTGTTTACAACAGTAGACAACATTAACCTCCACA | |
| | | CGCAAGTTGTGGACATGTCAATGACATATGGACAACAGTTTGGTCC | |
| | | AACTTATTTGGATGGAGCTGATGTTACTAAAATAAAACCTCATAATTC | |
| | | ACATGAAGGTAAAACATTTTATGTTTTACCTAATGATGACACTCTAC | |
| | | GTGTTGAGGCTTTTGAGTACTACCACACAACTGATCCTAGTTTTCTG | |
| | | GGTAGGTACATGTCAGCATTAAATCACACTAAAAAGTGGAAATACCC | |
| | | ACAAGTTAATGGTTTAACTTCTATTAAATGGGCAGATAACAACTGTT | |
| | | ATCTTGCCACTGCATTGTTAACACTCCAACAAATAGAGTTGAAGTTT | |
| | | AATCCACCTGCTCTACAAGATGCTTATTACAGAGCAAGGGCTGGTG | |
| | | AAGCTGCTAACTTTTGTGCACTTATCTTAGCCTACTGTAATAAGACA | |
| | | GTAGGTGAGTTAGGTGATGTTAGAGAAACAATGAGTTACTTGTTTCA | |
| | | ACATGCCAATTTAGATTCTTGCAAAAGAGTCTTGAACGTGGTGTGTA | |
| | | AAACTTGTGGACAACAGCAGACAACCCTTAAGGGTGTAGAAGCTGT | |
| | | TATGTACATGGGCACACTTTCTTATGAACAATTTAAGAAAGGTGTTC | |
| | | AGATACCTTGTACGTGTGGTAAACAAGCTACAAAATATCTAGTACAA | |
| | | CAGGAGTCACCTTGTTATGATGTCAGCACCACCTGCTCAGTATG | |
| | | AACTTAAGCATGGTACATTTACTTGTGCTAGTGAGTACACTGGTAAT | |
| | | TACCAGTGTGGTCACTATAAACATATAACTTCTAAAGAAACTTTGTAT | |
| | | TGCATAGACGGTGCTTTACTTACAAAGTCCTCAGAATACAAAGGTCC | |
| | | TATTACGGATGTCTACAAAGAAAACAGTTACACAACAACCATAA | |
| | | AACCAGTTACTTATAAATTGGATGGTGTTGTTTGTACAGAAATTGAC | |
| | | CCTAAGTTGGACAATTATTATAAGAAAGACAATTCTTATTTCACAGA | |
| | | GCAACCAATTGATCTTGTACCAAACCAACCATATCCAAACGCAAGCT | |
| | | TCGATAATTTTAAGTTTGTATGTGATAATATCAAATTTGCTGATGATT | |
| | | TAAACCAGTTAACTGGTTATAAGAAACCTGCTTCAAGAGAGCTTAAA | |
| | | GTTACATTTTTCCCTGACTTAAATGGTGATGTGGTGGCTATTGATTA | |
| | | TAAACACTACACACCCTCTTTTAAGAAAGGAGCTAAATTGTTACATA | |
| | | AACCTATTGTTTGGCATGTTAACAATGCAACTAATAAAGCCACGTAT | |
| | | AAACCAAATACCTGGTGTATACGTTGTCTTTGGAGCACAAAACCAGT | |
| | | TGAAACATCAAATTCGTTTGATGTACTGAAGTCAGAGGACGCGCAG | |
| | | GGAATGGATAATCTTGCCTGCGAAGATCTAAAACCAGTCTCTGAAG | |
| | | AAGTAGTGGAAAATCCTACCATACAGAAAGACGTTCTTGAGTGTAAT | |
| | | GTGAAAACTACCGAAGTTGTAGGAGACATTATACTTAAACCAGCAAA | |
| | | TAATAGTTTAAAAATTACAGAAGAGGTTGGCCACACAGATCTAATGG | |
| | | CTGCTTATGTAGACAATTCTAGTCTTACTATTAAGAAACCTAATGAAT | |
| | | TATCTAGAGTATTAGGTTTGAAAACCCTTGCTACTCATGGTTTAGCT | |
| | | GCTGTTAATAGTGTCCCTTGGGATACTATAGCTAATTATGCTAAGCC | |
| | | TTTTCTTAACAAAGTTGTTAGTACAACTACTAACATAGTTACACGGTG | |
| | | TTTAAACCGTGTTTGTACTAATTATATGCCTTATTTCTTTACTTTATTG | |
| | | CTACAATTGTGTACTTTTACTAGAAGTACAAATTCTAGAATTAAAGCA | |
| | | TCTATGCCGACTACTATAGCAAAGAATACTGTTAAGAGTGTCGGTAA | |
| | | ATTTTGTCTAGAGGCTTCATTTAATTATTTGAAGTCACCTAATTTTTC | |
| | | TAAACTGATAAATATTATAATTTGGTTTTTACTATTAAGTGTTTGCCTA | |
| | | GGTTCTTTAATCTACTCAACCGCTGCTTTAGGTGTTTTAATGTCTAAT | |
| | | TTAGGCATGCCTTCTTACTGTACTGGTTACAGAGAAGGCTATTTGAA | |
| | | CTCTACTAATGTCACTATTGCAACCTACTGTACTGGTTCTATACCTT | |
| | | GTAGTGTTTGTCTTAGTGGTTTAGATTCTTTAGACACCTATCCTTCTT | |
| | | TAGAAACTATACAAATTACCATTTCATCTTTTAAATGGGATTTAACTG | |
| | | CTTTTGGCTTAGTTGCAGAGTGGTTTTTGGCATATATTCTTTTCACTA | |
| | | GGTTTTTCTATGTACTTGGATTGGCTGCAATCATGCAATTGTTTTTCA | |
| | | GCTATTTTGCAGTACATTTTATTAGTAATTCTTGGCTTATGTGGTTAA | |
| | | TAATTAATCTTGTACAAATGGCCCCGATTTCAGCTATGGTTAGAATG | |
| | | TACATCTTCTTTGCATCATTTTATTATGTATGGAAAAGTTATGTGCAT | |
| | | GTTGTAGACGGTTGTAATTCATCAACTTGTATGATGTGTTACAAACG | |
| | | TAATAGAGCAACAAGAGTCGAATGTACAACTATTGTTAATGGTGTTA | |
| | | GAAGGTCCTTTTATGTCTATGCTAATGGAGGTAAAGGCTTTTGCAAA | |
| | | CTACACAATTGGAATTGTGTTAATTGTGATACATTCTGTGCTGGTAG | |
| | | TACATTTATTAGTGATGAAGTTGCGAGAGACTTGTCACTACAGTTTA | |
| | | AAAGACCAATAAATCCTACTGACCAGTCTTCTTACATCGTTGATAGT | |
| | | GTTACAGTGAAGAATGGTTCCATCCATCTTTACTTTGATAAAGCTGG | |
| | | TCAAAAGACTTATGAAAGACATTCTCTCTCTCATTTTGTTAACTTAGA | |
| | | CAACCTGAGAGCTAATAACACTAAAGGTTCATTGCCTATTAATGTTA | |
| | | TAGTTTTTGATGGTAAATCAAAATGTGAAGAATCATCTGCAAAATCA | |
| | | GCGTCTGTTTACTACAGTCAGCTTATGTGTCAACCTATACTGTTACT | |
| | | AGATCAGGCATTAGTGTCTGATGTTGGTGATAGTGCGGAAGTTGCA | |
| | | GTTAAAATGTTTGATGCTTACGTTAATACGTTTTCATCAACTTTTAAC | |
| | | GTACCAATGGAAAAACTCAAAACACTAGTTGCAACTGCAGAAGCTG | |
| | | AACTTGCAAAGAATGTGTCCTTAGACAATGTCTTATCTACTTTTATTT | |
| | | CAGCAGCTCGGCAAGGGTTTGTTGATTCAGATGTAGAAACTAAAGA | |
| | | TGTTGTTGAATGTCTTAAATTGTCACATCAATCTGACATAGAAGTTAC | |
| | | TGGCGATAGTTGTAATAACTATATGCTCACCTATAACAAAGTTGAAA | |
| | | ACATGACACCCCGTGACCTTGGTGCTTGTATTGACTGTAGTGCGCG | |
| | | TCATATTAATGCGCAGGTAGCAAAAAGTCACAACATTGCTTTGATAT | |
| | | GGAACGTTAAAGATTTCATGTCATTGTCTGAACAACTACGAAAACAA | |
| | | ATACGTAGTGCTGCTAAAAAGAATAACTTACCTTTTAAGTTGACATG | |
| | | TGCAACTACTAGACAAGTTGTTAATGTTGTAACAACAAAGATAGCAC | |
| | | TTAAGGGTGGTTGATGA | |
| 9 | Nsp3 | ATGCTCTTACTTGTTATTGACATCACCTTTCTAAAGAAAGATGCCCC | 363 |
| | (codon | TTATATTGTGGGAGACGTTGTCCAGGAGGGAGTCCTTACGGCCGTG | |
| | optimized) | GTGATTCCAACAAAGAAGGCTAGTGGCACCACAGAAATGCTGGCCA | |
| | | AGGCCTTGCGCAAGGTGCCGACAGACAACTACATCACTACATATCC | |
| | | TGGACAAGGCCTGAACGGATATACAGTGGAAGAGGCAAAGACTGT | |
| | | GCTAAAGAAGTGCAAGTCTGCCTTTTACATCCTTCCAAGCATTATTA | |
| | | GCAACGAGAAGCAGGAAATACTCGGAACCGTAAGCTGGAACCTTA | |
| | | GAGAGATGCTTGCGCATGCTGAGGAAACCCGAAAACTGATGCCTGT | |
| | | GTGTGTTGAAACCAAAGCCATCGTTTCTACCATCCAGCGAAAGTATA | |
| | | AGGGTATCAAGATCCAAGAGGGAGTGGTAGACTATGGCGCTAGATT | |
| | | CTACTTCTATACCTCTAAAACAACTGTCGCCTCTCTTATCAATACTCT | |
| | | GAATGACCTGAATGAGACTCTTGTGACCATGCCCCTGGGATACGTA | |
| | | ACCCATGGGCTTAACTTGGAAGAAGCCGCTCGCTACATGCGTAGCC | |
| | | TGAAGGTCCCTGCTACTGTTAGTGTCTCTTCCCCCGATGCCGTCAC | |
| | | AGCTTACAACGGGTATCTGACGTCAAGCTCCAAAACTCCTGAAGAG | |
| | | CACTTCATCGAGACCATTAGTCTAGCAGGATCCTATAAAGACTGGA | |
| | | GTTACTCAGGCCAGAGCACCCAGCTGGGGATAGAGTTCTTGAAAC | |
| | | GTGGAGACAAGTCCGTCTACTACACATCAAATCCCACGACGTTCCA | |
| | | CCTGGATGGGGAAGTGATAACCTTTGATAACTTAAAAACCCTGCTG | |
| | | AGCCTGAGGGAAGTCCGGACTATCAAGGTTTTTACTACAGTGGATA | |
| | | ATATTAACCTTCACACACAGGTGGTGGACATGTCCATGACCTATGG | |
| | | GCAGCAGTTCGGTCCTACCTACCTGGACGGAGCTGACGTTACCAAA | |
| | | ATCAAACCCCACAACTCTCATGAGGGAAAGACGTTCTACGTGCTGC | |
| | | CCAATGATGACACCTTGCGAGTGGAGGCATTTGAGTATTACCACAC | |
| | | TACCGATCCGTCTTTCTTAGGCCGCTATATGTCCGCTTTAAATCATA | |
| | | CAAAGAAGTGGAAGTACCCTCAGGTAAACGGCCTGACATCTATTAA | |
| | | ATGGGCCGACAACAACTGCTATCTGGCAACTGCTTTGCTCACACTT | |
| | | CAGCAGATTGAGTTGAAATTTAACCCTCCCGCACTGCAGGACGCTT | |
| | | ATTATCGGGCAAGGGCCGGTGAGGCGGCTAACTTCTGTGCTCTCAT | |
| | | CCTTGCTTACTGTAACAAAACAGTGGGCGAGCTAGGAGATGTCAGG | |
| | | GAGACAATGTCTTACTTGTTTCAGCACGCCAACTTAGACTCCTGCAA | |
| | | AAGAGTGCTCAATGTAGTCTGCAAAACCTGCGGTCAGCAGCAGACT | |
| | | ACCTTGAAGGGGGTCGAAGCAGTGATGTACATGGGTACACTATCCT | |
| | | ATGAGCAATTTAAAAAGGGTGTTCAGATCCCCTGCACATGTGGCAA | |
| | | GCAGGCAACAAAATACCTCGTGCAGCAAGAATCCCCATTTGTTATG | |
| | | ATGAGCGCACCTCCAGCCCAGTACGAACTGAAACATGGAACATTTA | |
| | | CCTGCGCTTCGGAGTACACTGGCAATTACCAGTGTGGGCATTACAA | |
| | | GCACATCACGTCCAAAGAAACACTCTACTGCATAGATGGAGCCCTG | |
| | | TTGACCAAGTCCAGCGAATATAAAGGCCCTATCACAGATGTTTTCTA | |
| | | CAAGGAGAATTCATATACAACCACCATCAAGCCCGTGACATACAAG | |
| | | TTAGACGGCGTGGTATGTACAGAAATTGACCCCAAGCTGGACAATT | |
| | | ACTACAAAAAAGACAATAGCTATTTTACTGAACAACCAATCGATCTT | |
| | | GTCCCTAATCAGCCCTACCCCAATGCGTCATTTGATAACTTTAAGTT | |
| | | TGTGTGTGATAATATTAAATTTGCAGATGATCTAAACCAGTTGACGG | |
| | | GATACAAGAAACCCGCCTCGCGCGAACTGAAAGTGACTTTTTTTCC | |
| | | AGATCTGAATGGGGATGTCGTGGCCATAGATTATAAGCATTATACTC | |
| | | CAAGTTTCAAGAAAGGCGCTAAGTTATTACATAAGCCTATTGTCTGG | |
| | | CATGTCAACAATGCTACAAATAAAGCCACTTATAAGCCAAACACATG | |
| | | GTGTATTAGGTGCCTGTGGAGCACAAAACCAGTGGAGACTAGCAAT | |
| | | TCCTTTGACGTCCTGAAGAGTGAAGATGCACAAGGCATGGATAACT | |
| | | TGGCCTGTGAGGACCTGAAACCAGTCTCAGAGGAAGTGGTGGAAA | |
| | | ATCCAACCATCCAGAAAGACGTACTGGAGTGTAACGTGAAAACCAC | |
| | | TGAGGTTGTGGGGGACATTATCTTAAAACCTGCTAACAACAGCCTG | |
| | | AAGATTACCGAGGAGGTAGGACACACTGATTTAATGGCAGCTTACG | |
| | | TAGATAACTCCAGTCTGACCATCAAGAAGCCTAACGAGCTGAGTCG | |
| | | GGTGCTAGGCCTCAAAACTCTGGCCACCCACGGCCTAGCGGCCGT | |
| | | TAATTCTGTACCGTGGGATACAATCGCTAATTATGCCAAGCCCTTCC | |
| | | TCAACAAGGTTGTCAGCACGACCACCAACATCGTGACCCGATGCTT | |
| | | GAACCGTGTGTGCACGAACTATATGCCCTATTTCTTTACCCTTCTAC | |
| | | TCCAGCTGTGTACTTTCACCCGGTCTACAAACAGTCGGATCAAGGC | |
| | | CAGCATGCCAACCACAATTGCCAAGAACACCGTTAAATCCGTTGGG | |
| | | AAGTTCTGCCTTGAGGCTAGCTTCAACTACCTGAAATCACCAAACTT | |
| | | CTCGAAGCTGATTAACATTATAATATGGTTCCTGCTCCTGTCCGTGT | |
| | | GTCTTGGAAGCCTTATCTACTCCACAGCTGCCCTGGGCGTCCTCAT | |
| | | GTCTAATCTGGGTATGCCTAGTTACTGCACAGGCTACCGGGAAGGT | |
| | | TATTTGAATAGCACTAACGTTACAATCGCCACATACTGCACAGGGA | |
| | | GCATTCCTTGCTCCGTTTGTTTGTCAGGTTTGGATTCTCTCGATACT | |
| | | TATCCCTCTCTGGAAACTATTCAGATCACGATTTCTAGTTTCAAATG | |
| | | GGACCTCACGGCATTTGGGCTCGTGGCCGAGTGGTTCCTGGCCTA | |
| | | TATACTCTTCACTAGGTTCTTCTATGTCCTGGGGCTGGCTGCCATCA | |
| | | TGCAGCTCTTTTTCAGTTATTTCGCAGTCCATTTTATCAGCAATAGCT | |
| | | GGCTCATGTGGCTCATAATAAATTTAGTACAGATGGCACCAATCTCG | |
| | | GCCATGGTGAGGATGTATATCTTTTTCGCATCCTTTTACTATGTGTG | |
| | | GAAATCATATGTCCACGTGGTGGACGGATGCAATAGTAGCACGTGC | |
| | | ATGATGTGCTACAAACGGAATAGAGCGACCCGCGTGGAATGTACCA | |
| | | CCATTGTGAATGGGGTTCGCAGATCATTCTACGTATATGCCAACGG | |
| | | CGGCAAGGGCTTCTGCAAGCTCCATAACTGGAACTGTGTCAATTGT | |
| | | GACACATTGTGCAGGATCAACTTTCATCAGTGACGAGGTCGCGC | |
| | | GGGACCTCAGTCTGCAATTCAAGAGACCGATCAACCCTACCGACCA | |
| | | GTCATCTTACATCGTGGATTCAGTTACCGTCAAGAATGGATCCATTC | |
| | | ACTTATACTTCGATAAAGCAGGCCAAAAGACTTACGAGAGGCACTC | |
| | | TCTCAGCCACTTTGTGAACCTGGACAATCTGAGGGCAAATAACACC | |
| | | AAGGGGTCTCTTCCCATTAATGTGATAGTGTTTGACGGGAAGAGCA | |
| | | AGTGTGAGGAGAGCAGCGCCAAATCTGCCTCAGTGTACTACAGCC | |
| | | AGCTCATGTGTCAACCAATACTCCTTCTAGACCAAGCCCTGGTCTC | |
| | | AGACGTTGGGGACAGTGCTGAAGTGGCTGTGAAGATGTTCGATGC | |
| | | TTATGTGAACACATTTTCTTCCACTTTCAACGTCCCTATGGAGAAAC | |
| | | TAAAGACGCTGGTGGCAACGGCCGAGGCCGAGCTGGCCAAGAAC | |
| | | GTTTCATTGGACAATGTGCTCTCGACATTCATCTCCGCTGCAAGACA | |
| | | GGGCTTTGTGGACTCAGATGTAGAAACCAAGGATGTGGTCGAGTG | |
| | | CTTGAAGTTGTCGCACCAGAGCGACATCGAAGTCACAGGTGACAG | |
| | | CTGCAATAATTACATGCTGACCTATAACAAGGTAGAGAACATGACAC | |
| | | CACGCGATTTGGGAGCCTGCATAGACTGTAGTGCTAGGCACATTAA | |
| | | TGCACAGGTCGCAAAATCTCATAACATCGCGCTAATCTGGAATGTC | |
| | | AAAGATTTCATGAGCCTGTCTGAGCAATTGAGAAAGCAAATCAGGA | |
| | | GTGCAGCTAAAAAAAATAACCTCCCGTTCAAGCTAACATGTGCCAC | |
| | | AACTAGACAGGTGGTGAACGTGGTAACTACTAAAATTGCGCTGAAG | |
| | | GGTGGTTGATAA | |
| 10 | Nsp4 | ATGAAAATTGTTAATAATTGGTTGAAGCAGTTAATTAAAGTTACACTT | 364 |
| | | GTGTTCCTTTTTGTTGCTGCTATTTTCTATTTAATAACACCTGTTCAT | |
| | | GTCATGTCTAAACATACTGACTTTTCAAGTGAAATCATAGGATACAA | |
| | | GGCTATTGATGGTGGTGTCACTCGTGACATAGCATCTACAGATACT | |
| | | TGTTTTGCTAACAAACATGCTGATTTTGACACATGGTTTAGCCAGCG | |
| | | TGGTGGTAGTTATACTAATGACAAAGCTTGCCCATTGATTGCTGCAG | |
| | | TCATAACAAGAGAAGTGGGTTTTGTCGTGCCTGGTTTGCCTGGCAC | |
| | | GATATTACGCACAACTAATGGTGACTTTTTGCATTTCTTACCTAGAG | |
| | | TTTTTAGTGCAGTTGGTAACATCTGTTACACACCATCAAAACTTATA | |
| | | GAGTACACTGACTTTGCAACATCAGCTTGTGTTTTGGCTGCTGAATG | |
| | | TACAATTTTTAAAGATGCTTCTGGTAAGCCAGTACCATATTGTTATGA | |
| | | TACCAATGTACTAGAAGGTTCTGTTGCTTATGAAAGTTTACGCCCTG | |
| | | ACACACGTTATGTGCTCATGGATGGCTCTATTATTCAATTTCCTAAC | |
| | | ACCTACCTTGAAGGTTCTGTTAGAGTGGTAACAACTTTTGATTCTGA | |
| | | GTACTGTAGGCACGGCACTTGTGAAAGATCAGAAGCTGGTGTTTGT | |
| | | GTATCTACTAGTGGTAGATGGGTACTTAACAATGATTATTACAGATC | |
| | | TTTACCAGGAGTTTTCTGTGGTGTAGATGCTGTAAATTTATTTACTAA | |
| | | TATGTTTACACCACTAATTCAACCTATTGGTGCTTTGGACATATCAG | |
| | | CATCTATAGTAGCTGGTGGTATTGTGGCTATCGTAGTAACATGCCTT | |
| | | GCCTACTATTTTATGAGGTTTAGAAGAGCTTTTGGTGAATACAGTCA | |
| | | TGTAGTTGCCTTTAATACTTTACTATTCCTTATGTCATTCATTGTACT | |
| | | CTGTTTAACACCAGTTTACTCATTCTTACCTGGTGTTTATTCTGTTAT | |
| | | TTACTTGTACTTGACATTTTATCTTACTAATGATGTTTCTTTTTTAGCA | |
| | | CATATTCAGTGGATGGTTATGTTCACACCTTTAGTACCTTTCTGGAT | |
| | | AACAATTGCTTATATCATTTGTATTTCCACAAAGCATTTCTATTGGTT | |
| | | CTTTAGTAATTACCTAAAGAGACGTGTAGTCTTTAATGGTGTTTCCTT | |
| | | TAGTACTTTTGAAGAAGCTGCGCTGTGCACCTTTTTGTTAAATAAAG | |
| | | AAATGTATCTAAAGTTGCGTAGTGATGTGCTATTACCTTTTACGCAA | |
| | | TATAATAGATACTTAGCTCTTTATAATAAGTACAAGTATTTTAGTGGA | |
| | | GCAATGGATACAACTAGCTACAGAGAAGCTGCTTGTTGTCATCTCG | |
| | | CAAAGGCTCTCAATGACTTCAGTAACTCAGGTTCTGATGTTCTTTAC | |
| | | CAACCACCACAAATCTCTATCACCTCAGCTGTTTTGCAGTGATGA | |
| 11 | Nsp4 | ATGAAAATCGTCAACAACTGGCTGAAACAGCTGATCAAAGTCACCTT | 365 |
| | (codon | AGTGTTCCTGTTCGTGGCAGCCATTTTCTATCTGATCACCCCTGTGC | |
| | optimized) | ATGTCATGTCAAAGCATACAGATTTTTCTAGTGAAATTATCGGTTATA | |
| | | AAGCTATCGACGGGGGGGTGACTAGGGACATAGCGTCGACTGATA | |
| | | CTTGCTTTGCAAACAAGCACGCAGATTTGATACCTGGTTTTCTCAA | |
| | | CGCGGAGGCTCCTACACAAATGACAAGGCCTGCCCACTCATCGCC | |
| | | GCTGTTATTACCAGAGAGGTAGGCTTCGTTGTTCCTGGGCTCCCAG | |
| | | GAACCATTCTGCGGACGACTAACGGAGATTTTCTCCACTTTCTGCC | |
| | | TAGAGTGTTTTCAGCTGTAGGAAACATATGTTACACACCCTCGAAGC | |
| | | TGATTGAGTACACCGACTTCGCAACTTCAGCATGTGTTCTCGCTGC | |
| | | AGAGTGCACCATCTTCAAGGACGCCTCCGGGAAGCCGGTCCCTTA | |
| | | CTGCTATGACACCAATGTGTTGGAAGGTTCCGTGGCCTATGAGTCA | |
| | | CTCCGTCCTGACACTCGGTATGTGTTGATGGATGGCAGCATCATTC | |
| | | AGTTTCCCAACACATATCTCGAGGGGAGTGTGAGGGTCGTGACCAC | |
| | | ATTTGACAGTGAATATTGCAGGCACGGAACCTGTGAACGATCCGAG | |
| | | GCCGGAGTATGCGTAAGCACATCAGGGAGGTGGGTACTCAATAAT | |
| | | GATTATTACCGTTCTTTGCCAGGGGTGTTCTGTGGTGTGGATGCGG | |
| | | TCAATCTCTTTACAAACATGTTTACTCCGTTAATTCAGCCAATAGGC | |
| | | GCTCTGGACATATCTGCTTCTATAGTAGCTGGCGGCATTGTTGCCA | |
| | | TTGTTGTGACATGCCTCGCATACTACTTCATGAGGTTCCGGCGAGC | |
| | | CTTCGGTGAGTATTCTCATGTGGTGGCGTTCAATACACTGCTGTTC | |
| | | CTGATGAGCTTCATTGTGCTGTGTCTGACACCAGTGTATTCCTTTTT | |
| | | GCCTGGTGTCTATTCTGTGATATACCTGTATTTGACCTTCTACCTTA | |
| | | CCAATGATGTGTCGTTCCTAGCGCACATCCAGTGGATGGTGATGTT | |
| | | CACTCCCTTAGTCCCCTTCTGGATCACAATCGCCTACATCATCTGCA | |
| | | TCAGCACCAAACATTTTTACTGGTTCTTCTCAAACTACCTGAAGCGC | |
| | | CGCGTGGTCTTTAATGGAGTCTCCTTCAGCACTTTTGAAGAGGCTG | |
| | | CCCTATGTACGTTTCTTCTCAACAAGGAGATGTACCTGAAACTAAGA | |
| | | TCTGATGTTCTGCTCCCATTCACGCAGTACAACAGATATCTTGCACT | |
| | | TTACAACAAATACAAGTACTTTAGTGGCGCCATGGACACAACGTCCT | |
| | | ACCGGGAAGCTGCTTGTTGTCACCTGGCCAAGGCCCTGAATGACTT | |
| | | TAGCAACAGCGGCAGTGACGTATTGTATCAGCCCCCCCAGATCTCC | |
| | | ATTACTAGCGCAGTGTTACAATGATAA | |
| 12 | Nsp5, | ATGAGTGGTTTTAGAAAAATGGCATTCCCATCTGGTAAAGTTGAGG | 366 |
| | Nsp6, | GTTGTATGGTACAAGTAACTTGTGGTACAACTACACTTAACGGTCTT | |
| | Nsp7, | TGGCTTGATGACGTAGTTTACTGTCCAAGACATGTGATCTGCACCT | |
| | Nsp8, | CTGAAGATATGCTTAACCCTAATTATGAAGATTTACTCATTCGTAAGT | |
| | Nsp9, | CTAATCATAATTTCTTGGTACAGGCTGGTAATGTTCAACTCAGGGTT | |
| | Nsp10 | ATTGGACATTCTATGCAAAATTGTGTACTTAAGCTTAAGGTTGATAC | |
| | | AGCCAATCCTAAGACACCTAAGTATAAGTTTGTTCGCATTCAACCAG | |
| | | GACAGACTTTTTCAGTGTTAGCTTGTTACAATGGTTCACCATCTGGT | |
| | | GTTTACCAATGTGCTATGAGACACAATTTCACTATTAAGGGTTCATT | |
| | | CCTTAATGGTTCATGTGGTAGTGTTGGTTTTAACATAGATTATGACT | |
| | | GTGTCTCTTTTTGTTACATGCACCATATGGAATTACCAACTGGAGTT | |
| | | CATGCTGGCACAGACTTAGAAGGTAACTTTTATGGACCTTTTGTTGA | |
| | | CAGGCAAACAGCACAAGCAGCTGGTACGGACACAACTATTACAGTT | |
| | | AATGTTTTAGCTTGGTTGTACGCTGCTGTTATAAATGGAGACAGGTG | |
| | | GTTTCTCAATCGATTTACCACAACTCTTAATGACTTTAACCTTGTGG | |
| | | CTATGAAGTACAATTATGAACCTCTAACACAAGACCATGTTGACATA | |
| | | CTAGGACCTCTTTCTGCTCAAACTGGAATTGCCGTTTTAGATATGTG | |
| | | TGCTTCATTAAAAGAATTACTGCAAAATGGTATGAATGGACGTACCA | |
| | | TATTGGGTAGTGCTTTATTAGAAGATGAATTTACACCTTTTGATGTTG | |
| | | TTAGACAATGCTCAGGTGTTACTTTCCAAAGTGCAGTGAAAAGAACA | |
| | | ATCAAGGGTACACACCACTGGTTGTTACTCACAATTTTGACTTCACT | |
| | | TTTAGTTTTAGTCCAGAGTACTCAATGGTCTTTGTTCTTTTTTTTGTA | |
| | | TGAAAATGCCTTTTTACCTTTTGCTATGGGTATTATTGCTATGTCTGC | |
| | | TTTTGCAATGATGTTTGTCAAACATAAGCATGCATTTCTCTGTTTGTT | |
| | | TTTGTTACCTTCTCTTGCCACTGTAGCTTATTTTAATATGGTCTATAT | |
| | | GCCTGCTAGTTGGGTGATGCGTATTATGACATGGTTGGATATGGTT | |
| | | GATACTAGTTTGAAGCTAAAAGACTGTGTTATGTATGCATCAGCTGT | |
| | | AGTGTTACTAATCCTTATGACAGCAAGAACTGTGTATGATGATGGTG | |
| | | CTAGGAGAGTGTGGACACTTATGAATGTCTTGACACTCGTTTATAAA | |
| | | GTTTATTATGGTAATGCTTTAGATCAAGCCATTTCCATGTGGGCTCT | |
| | | TATAATCTCTGTTACTTCTAACTACTCAGGTGTAGTTACAACTGTCAT | |
| | | GTTTTTGGCCAGAGGTATTGTTTTTATGTGTGTTGAGTATTGCCCTA | |
| | | TTTTCTTCATAACTGGTAATACACTTCAGTGTATAATGCTAGTTTATT | |
| | | GTTTCTTAGGCTATTTTTGTACTTGTTACTTTGGCCTCTTTTGTTTAC | |
| | | TCAACCGCTACTTTAGACTGACTCTTGGTGTTTATGATTACTTAGTTT | |
| | | CTACACAGGAGTTTAGATATATGAATTCACAGGGACTACTCCCACC | |
| | | CAAGAATAGCATAGATGCCTTCAAACTCAACATTAAATTGTTGGGTG | |
| | | TTGGTGGCAAACCTTGTATCAAAGTAGCCACTGTACAGTCTAAAATG | |
| | | TCAGATGTAAAGTGCACATCAGTAGTCTTACTCTCAGTTTTGCAACA | |
| | | ACTCAGAGTAGAATCATCATCTAAATTGTGGGCTCAATGTGTCCAGT | |
| | | TACACAATGACATTCTCTTAGCTAAAGATACTACTGAAGCCTTTGAA | |
| | | AAAATGGTTTCACTACTTTCTGTTTTGCTTTCCATGCAGGGTGCTGT | |
| | | AGACATAAACAAGCTTTGTGAAGAAATGCTGGACAACAGGGCAACC | |
| | | TTACAAGCTATAGCCTCAGAGTTTAGTTCCCTTCCATCATATGCAGC | |
| | | TTTTGCTACTGCTCAAGAAGCTTATGAGCAGGCTGTTGCTAATGGT | |
| | | GATTCTGAAGTTGTTCTTAAAAAGTTGAAGAAGTCTTTGAATGTGGC | |
| | | TAAATCTGAATTTGACCGTGATGCAGCCATGCAACGTAAGTTGGAA | |
| | | AAGATGGCTGATCAAGCTATGACCCAAATGTATAAACAGGCTAGAT | |
| | | CTGAGGACAAGAGGGCAAAAGTTACTAGTGCTATGCAGACAATGCT | |
| | | TTTCACTATGCTTAGAAAGTTGGATAATGATGCACTCAACAACATTA | |
| | | TCAACAATGCAAGAGATGGTTGTGTTCCCTTGAACATAATACCTCTT | |
| | | ACAACAGCAGCCAAACTAATGGTTGTCATACCAGACTATAACACATA | |
| | | TAAAAATACGTGTGATGGTACAACATTTACTTATGCATCAGCATTGT | |
| | | GGGAAATCCAACAGGTTGTAGATGCAGATAGTAAAATTGTTCAACTT | |
| | | AGTGAAATTAGTATGGACAATTCACCTAATTTAGCATGGCCTCTTAT | |
| | | TGTAACAGCTTTAAGGGCCAATTCTGCTGTCAAATTACAGAATAATG | |
| | | AGCTTAGTCCTGTTGCACTACGACAGATGTCTTGTGCTGCCGGTAC | |
| | | TACACAAACTGCTTGCACTGATGACAATGCGTTAGCTTACTACAACA | |
| | | CAACAAAGGGAGGTAGGTTTGTACTTGCACTGTTATCCGATTTACA | |
| | | GGATTTGAAATGGGCTAGATTCCCTAAGAGTGATGGAACTGGTACT | |
| | | ATTTATACAGAACTGGAACCACCTTGTAGGTTTGTTACAGACACACC | |
| | | TAAAGGTCCTAAAGTGAAGTATTTATACTTTATTAAAGGATTAAACAA | |
| | | CCTAAATAGAGGTATGGTACTTGGTAGTTTAGCTGCCACAGTACGT | |
| | | CTACAAGCTGGTAATGCAACAGAAGTGCCTGCCAATTCAACTGTATT | |
| | | ATCTTTCTGTGCTTTTGCTGTAGATGCTGCTAAAGCTTACAAAGATT | |
| | | ATCTAGCTAGTGGGGGACAACCAATCACTAATTGTGTTAAGATGTTG | |
| | | TGTACACACACTGGTACTGGTCAGGCAATAACAGTTACACCGGAAG | |
| | | CCAATATGGATCAAGAATCCTTTGGTGGTGCATCGTGTTGTCTGTAC | |
| | | TGCCGTTGCCACATAGATCATCCAAATCCTAAAGGATTTTGTGACTT | |
| | | AAAAGGTAAGTATGTACAAATACCTACAACTTGTGCTAATGACCCTG | |
| | | TGGGTTTTACACTTAAAAACACAGTCTGTACCGTCTGCGGTATGTG | |
| | | GAAAGGTTATGGCTGTAGTTGTGATCAACTCCGCGAACCCATGCTT | |
| | | CAGTGATGA | |
| 13 | Nsp5_{,} | ATGAGTGGCTTCCGGAAGATGGCTTTTCCATCAGGCAAAGTGGAAG | 367 |
| | Nsp6, | GCTGCATGGTCCAGGTGACCTGTGGAACCACTACATTGAACGGCCT | |
| | Nsp7, | CTGGCTGGATGACGTCGTATACTGTCCTAGACACGTGATCTGCACG | |
| | Nsp8, | TCAGAGGACATGCTCAATCCTAATTATGAAGATCTACTCATACGGAA | |
| | Nsp9, | GTCGAACCATAATTTCTTGGTGCAAGCAGGGAATGTGCAGCTGCGC | |
| | Nsp10 | GTCATCGGCCACAGCATGCAAAACTGTGTACTGAAGTTGAAGGTGG | |
| | (codon | ACACTGCCAATCCTAAAACCCCCAAGTATAAGTTCGTGAGGATCCA | |
| | optimized) | GCCAGGACAAACTTTCAGTGTACTGGCGTGCTACAATGGCTCCCCT | |
| | | TCTGGCGTCTATCAGTGTGCTATGCGCCATAATTTTACGATTAAGGG | |
| | | TTCCTTCCTAAACGGATCATGCGGCAGTGTGGGCTTTAATATAGACT | |
| | | ACGACTGCGTGAGTTTCTGCTATATGCATCACATGGAGCTACCAAC | |
| | | AGGGGTCCATGCTGGAACTGACCTGGAGGGCAATTTCTATGGGCC | |
| | | TTTTGTGGATCGTCAGACAGCACAAGCCGCCGGCACCGACACCAC | |
| | | CATTACGGTAAATGTGTTAGCCTGGCTTTATGCTGCTGTAATCAATG | |
| | | GAGACCGTTGGTTCCTGAACCGCTTTACGACAACCCTCAATGACTT | |
| | | CAATCTAGTAGCCATGAAGTACAACTATGAGCCCTTAACACAGGAC | |
| | | CACGTGGATATTCTGGGCCCGCTTAGCGCCCAGACCGGCATCGCG | |
| | | GTTCTGGATATGTGTGCATCACTGAAAGAGCTTCTGCAGAACGGAA | |
| | | TGAATGGAAGGACCATATTGGGTTCTGCGTTGCTTGAAGATGAGTT | |
| | | CACCCCGTTTGATGTTGTGCGCCAGTGTAGCGGGGTCACCTTTCAG | |
| | | TCTGCTGTGAAGCGGACTATAAAGGGAACACATCACTGGTTACTGC | |
| | | TGACGATACTGACGTCTCTGCTGGTACTGGTACAGAGTACCCAGTG | |
| | | GTCTTTGTTCTTTTTTCTCTACGAAAACGCGTTCCTGCCCTTTGCGA | |
| | | TGGGCATTATTGCTATGTCCGCGTTCGCCATGATGTTTGTGAAGCA | |
| | | CAAACATGCCTTCCTCTGCTTGTTTTTGCTCCCTTCTCTAGCAACTG | |
| | | TGGCCTATTTCAACATGGTTTACATGCCAGCAAGCTGGGTGATGAG | |
| | | GATTATGACCTGGCTTGACATGGTTGACACATCTCTGAAGCTTAAG | |
| | | GACTGTGTCATGTACGCCAGCGCTGTAGTTCTGCTGATTCTCATGA | |
| | | CAGCTCGCACCGTCTACGATGATGGGGCCAGACGAGTGTGGACAT | |
| | | TAATGAACGTGTTAACTTTGGTTTACAAGGTTTACTATGGAAATGCC | |
| | | CTTGATCAGGCAATCAGCATGTGGGCATTAATCATCTCAGTCACTA | |
| | | GCAACTACAGTGGGGTCGTTACCACAGTGATGTTCCTAGCTCGAGG | |
| | | AATCGTGTTCATGTGCGTGGAGTACTGTCCCATCTTCTTCATCACTG | |
| | | GTAACACATTGCAGTGCATCATGCTGGTATATTGCTTCCTGGGCTA | |
| | | CTTCTGTACATGTTACTTTGGACTATTTTGCCTGCTGAACCGCTACT | |
| | | TCCGGCTGACGTTGGGAGTGTACGACTACCTCGTCTCGACCCAGG | |
| | | AGTTCAGGTACATGAATAGTCAGGGCCTCCTGCCGCCCAAGAACTC | |
| | | CATTGACGCTTTCAAGCTGAACATCAAACTTCTTGGGGTGGGTGGC | |
| | | AAGCCCTGTATTAAGGTGGCCACTGTGCAATCCAAGATGTCTGACG | |
| | | TCAAGTGTACCAGCGTCGTGTTACTGTCAGTGCTACAGCAGTTACG | |
| | | AGTGGAAAGTTCTAGCAAGCTTTGGGCTCAATGCGTCCAGCTGCAC | |
| | | AATGACATTCTTCTAGCCAAAGACACCACTGAAGCTTTTGAGAAAAT | |
| | | GGTCTCGTTGCTCTCCGTGCTGTTGTCCATGCAGGGGGCTGTGGA | |
| | | CATCAACAAGCTATGTGAAGAGATGCTGGACAACAGAGCTACCCTC | |
| | | CAAGCCATTGCCTCAGAATTTTCCTCCCTACCCTCTTACGCTGCATT | |
| | | TGCTACAGCGCAGGAAGCCTACGAGCAGGCAGTGGCAAACGGTGA | |
| | | TAGTGAAGTAGTTCTGAAAAAGCTGAAGAAGTCCCTGAATGTCGCA | |
| | | AAATCCGAGTTTGACAGAGATGCCGCTATGCAGCGGAAACTGGAGA | |
| | | AGATGGCTGACCAGGCAATGACTCAGATGTATAAGCAGGCAAGGTC | |
| | | AGAGGACAAAAGGGCTAAGGTCACATCGGCTATGCAGACGATGCT | |
| | | GTTTACCATGCTCAGAAAACTCGACAATGACGCGCTCAACAATATTA | |
| | | TCAATAACGCCCGCGATGGCTGTGTTCCACTAAACATCATCCCCCT | |
| | | TACCACTGCTGCTAAACTCATGGTTGTGATTCCAGATTACAACACCT | |
| | | ATAAAAATACTTGCGATGGTACCACATTTACATATGCCAGTGCCCTC | |
| | | TGGGAGATTCAGCAAGTGGTGGATGCCGACAGCAAAATTGTGCAG | |
| | | CTTTCTGAAATCTCTATGGATAACAGCCCCAACCTAGCTTGGCCACT | |
| | | GATCGTGACTGCACTCCGGGCCAATTCCGCAGTCAAGTTGCAGAAT | |
| | | AATGAGCTGTCCCCTGTTGCCCTTCGACAGATGAGCTGCGCAGCA | |
| | | GGAACAACACAGACAGCCTGTACAGATGATAATGCTTTGGCCTATT | |
| | | ACAACACAACCAAGGGTGGAAGATTTGTCCTGGCCCTGCTTTCAGA | |
| | | CCTGCAAGACCTTAAGTGGGCCAGATTCCCTAAGTCTGACGGGACT | |
| | | GGTACTATCTATACCGAATTGGAGCCTCCATGCAGGTTCGTCACTG | |
| | | ATACTCCCAAAGGGCCGAAGGTGAAATATTTATATTTTATCAAGGGA | |
| | | TTAAATAACCTGAACCGGGGCATGGTGCTGGGGAGCTTGGCAGCC | |
| | | ACGGTAAGGCTACAAGCTGGAAACGCCACAGAGGTTCCAGCGAAC | |
| | | AGTACAGTTCTGAGCTTCTGTGCGTTCGCCGTAGATGCAGCAAAAG | |
| | | CATACAAAGATTACCTGGCCAGCGGAGGACAGCCTATCACAAACTG | |
| | | CGTCAAAATGCTGTGCACCCACACGGGAACTGGACAGGCCATAACT | |
| | | GTTACCCCAGAGGCTAACATGGACCAGGAGTCTTTTGGGGGTGCTT | |
| | | CCTGCTGTCTGTACTGCCGTTGCCACATTGATCATCCAAACCCTAAA | |
| | | GGGTTTTGTGATCTTAAGGGTAAATATGTGCAGATACCTACAACATG | |
| | | CGCCAACGATCCCGTGGGGTTCACTCTGAAAAATACCGTGTGTACC | |
| | | GTCTGTGGCATGTGGAAAGGCTATGGTTGCAGCTGCGATCAACTCA | |
| | | GAGAACCCATGCTTCAATGATAA | |
| 14 | Nsp12 | ATGTCAGCTTGCACAATCGTTTTTAAACGGGTTTGCGGTGTAAGTG | 368 |
| | | CAGCCCGTCTTACACCGTGCGGCACAGGCACTAGTACTGATGTCGT | |
| | | ATACAGGGCTTTTGACATCTACAATGATAAAGTAGUGGTTTTGCTA | |
| | | AATTCCTAAAAACTAATTGTTGTCGCTTCCAAGAAAAGGACGAAGAT | |
| | | GACAATTTAATTGATTCTTACTTTGTAGTTAAGAGACACACTTTCTCT | |
| | | AACTACCAACATGAAGAAACAATTTATAATTTACTTAAGGATTGTCCA | |
| | | GCTGTTGCTAAACATGACTTCTTTAAGTTTAGAATAGACGGTGACAT | |
| | | GGTACCACATATATCACGTCAACGTCTTACTAAATACACAATGGCAG | |
| | | ACCTCGTCTATGCTTTAAGGCATTTTGATGAAGGTAATTGTGACACA | |
| | | TTAAAAGAAATACTTGTCACATACAATTGTTGTGATGATGATTATTTC | |
| | | AATAAAAAGGACTGGTATGATTTTGTAGAAAACCCAGATATATTACG | |
| | | CGTATACGCCAACTTAGGTGAACGTGTACGCCAAGCTTTGTTAAAA | |
| | | ACAGTACAATTCTGTGATGCCATGCGAAATGCTGGTATTGTTGGTGT | |
| | | ACTGACATTAGATAATCAAGATCTCAATGGTAACTGGTATGATTTCG | |
| | | GTGATTTCATACAAACCACGCCAGGTAGTGGAGTTCCTGTTGTAGA | |
| | | TTCTTATTATTCATTGTTAATGCCTATATTAACCTTGACCAGGGCTTT | |
| | | AACTGCAGAGTCACATGTTGACACTGACTTAACAAAGCCTTACATTA | |
| | | AGTGGGATTTGTTAAAATATGACTTCACGGAAGAGAGGTTAAAACTC | |
| | | TTTGACCGTTATTTTAAATATTGGGATCAGACATACCACCCAAATTG | |
| | | TGTTAACTGTTTGGATGACAGATGCATTCTGCATTGTGCAAACTTTA | |
| | | ATGTTTTATTCTCTACAGTGTTCCCACTTACAAGMTTGGACCACTA | |
| | | GTGAGAAAAATATTTGTTGATGGTGTTCCATTTGTAGTTTCAACTGG | |
| | | ATACCACTTCAGAGAGCTAGGTGTTGTACATAATCAGGATGTAAACT | |
| | | TACATAGCTCTAGACTTAGTTTTAAGGAATTACTTGTGTATGCTGCT | |
| | | GACCCTGCTATGCACGCTGCTTCTGGTAATCTATTACTAGATAAACG | |
| | | CACTACGTGCTTCAGTAGCTGCACTTACTAACAATGTTGCTTTTC | |
| | | AAACTGTCAAACCCGGTAATTAACAAAGACTTCTATGACTTTGCT | |
| | | GTGTCTAAGGGTTTCTTTAAGGAAGGAAGTTCTGTTGAATTAAAACA | |
| | | CTTCTTCTTTGCTCAGGATGGTAATGCTGCTATCAGCGATTATGACT | |
| | | ACTATCGTTATAATCTACCAACAATGTGTGATATCAGACAACTACTAT | |
| | | TTGTAGTTGAAGTTGTTGATAAGTACTTTGATTGTTACGATGGTGGC | |
| | | TGTATTAATGCTAACCAAGTCATCGTCAACAACCTAGACAAATCAGC | |
| | | TGGTTTTCCATTTAATAAATGGGGTAAGGCTAGACTTTATTATGATTC | |
| | | AATGAGTTATGAGGATCAAGATGCACTTTTCGCATATACAAAACGTA | |
| | | ATGTCATCCCTACTATAACTCAAATGAATCTTAAGTATGCCATTAGT | |
| | | GCAAAGAATAGAGCTCGCACCGTAGCTGGTGTCTCTATCTGTAGTA | |
| | | CTATGACCAATAGACAGTTTCATCAAAAATTATTGAAATCAATAGCC | |
| | | GCCACTAGAGGAGCTACTGTAGTAATTGGAACAAGCAAATTCTATG | |
| | | GTGGTTGGCACAACATGTTAAAAACTGTTTATAGTGATGTAGAAAAC | |
| | | CCTCACCTTATGGGTTGGGATTATCCTAAATGTGATAGAGCCATGC | |
| | | CTAACATGCTTAGAATTATGGCCTCACTTGTTCTTGCTCGCAAACAT | |
| | | ACAACGTGTTGTAGCTTGTCACACCGTTTCTATAGATTAGCTAATGA | |
| | | GTGTGCTCAAGTATTGAGTGAAATGGTCATGTGTGGCGGTTCACTA | |
| | | TATGTTAAACCAGGTGGAACCTCATCAGGAGATGCCACAACTGCTT | |
| | | ATGCTAATAGTGTTTTTAACATTTGTCAAGCTGTCACGGCCAATGTT | |
| | | AATGCACTTTTATCTACTGATGGTAACAAAATTGCCGATAAGTATGT | |
| | | CCGCAATTTACAACACAGACTTTATGAGTGTCTCTATAGAAATAGAG | |
| | | ATGTTGACACAGACTTTGTGAATGAGTTTTACGCATATTTGCGTAAA | |
| | | CATTTCTCAATGATGATACTTTCTGACGATGCTGTTGTGTGTTTCAAT | |
| | | AGCACTTATGCATCTCAAGGTCTAGTGGCTAGCATAAAGAACTTTAA | |
| | | GTCAGTTCTTTATTATCAAAACAATGTTTTTATGTCTGAAGCAAAATG | |
| | | TTGGACTGAGACTGACCTTACTAAAGGACCTCATGAATTGCTCTC | |
| | | AACATACAATGCTAGTTAAACAGGGTGATGATTATGTGTACCTTCCT | |
| | | TACCCAGATCCATCAAGAATCCTAGGGGCCGGCTGTTTTGTAGATG | |
| | | ATATCGTAAAAACAGATGGTACACTTATGATTGAACGGTTCGTGTCT | |
| | | TTAGCTATAGATGCTTACCCACTTACTAAACATCCTAATCAGGAGTA | |
| | | TGCTGATGTCTTTCATTTGTACTTACAATACATAAGAAAGCTACATGA | |
| | | TGAGTTAACAGGACACATGTTAGACATGTATTCTGTTATGCTTACTA | |
| | | ATGATAACACTTCAAGGTATTGGGAACCTGAGTTTTATGAGGCTATG | |
| | | TACACACCGCATACAGTCTTACAGTGATGA | |
| 15 | Nsp | ATGTCTGCCTGCACAATTGTGTTCAAGCGGGTGTGTGGAGTGTCTG | 369 |
| | (codon | CAGCGCGATTAACTCCCTGTGGAACCGGCACCTCAACAGACGTAGT | |
| | optimized) | GTACCGTGCCTTCGATATTTACAATGATAAGGTGGCCGGGTTCGCG | |
| | | AAATTCCTAAAGACGAACTGTTGCAGGTTCCAGGAGAAGGATGAAG | |
| | | ATGACAATCTCATAGATTCTTATTTCGTGGTTAAACGGCATACATTTA | |
| | | GTAATTACCAACATGAAGAAACAATCTACAACCTCCTCAAAGACTGT | |
| | | CCTGCTGTGGCAAAACATGACTTCTTCAAGTTCCGGATTGACGGCG | |
| | | ACATGGTTCCACACATCTCTCGGCAGAGATTAACAAAGTACACCAT | |
| | | GGCTGACCTTGTATATGCACTGCGACACTTTGATGAAGGAAATTGC | |
| | | GATACTCTGAAAGAGATTCTTGTTACCTACAACTGCTGTGATGACGA | |
| | | CTACTTCAACAAGAAAGACTGGTACGACTTTGTAGAAAACCCAGATA | |
| | | TCCTCAGAGTTTACGCCAACTTAGGAGAGCGCGTAAGACAAGCCCT | |
| | | GTTAAAAACAGTTCAGTTCTGTGATGCCATGAGGAATGCAGGAATC | |
| | | GTGGGAGTCTTGACCCTGGACAACCAGGACTTGAATGGGAACTGG | |
| | | TATGACTTCGGGGATTTCATCCAGACTACACCCGGCAGCGGAGTGC | |
| | | CAGTGGTGGATAGCTATTACTCCTTGCTGATGCCCATCCTTACGTT | |
| | | GACAAGAGCCCTGACAGCAGAGAGCCATGTGGACACTGACCTTAC | |
| | | CAAACCCTACATCAAGTGGGACTTACTCAAGTATGACTTCACAGAA | |
| | | GAGCGGCTAAAGTTGTTCGATCGCTACTTTAAATATTGGGATCAGA | |
| | | CCTATCATCCCAACTGTGTGAATTGTCTGGATGACAGGTGCATATTG | |
| | | CACTGTGCAAACTTCAACGTTCTTTTTTCCACGGTTTTCCCCCTGAC | |
| | | CAGCTTTGGGCCTCTGGTGAGAAAGATCTTTGTCGACGGGGTACCA | |
| | | TTTGTTGTCAGTACCGGCTACCATTTCAGGGAACTCGGTGTCGTGC | |
| | | ACAATCAGGATGTAAACCTGCACAGCAGCCGGCTAAGCTTTAAAGA | |
| | | ACTGCTTGTTTATGCTGCTGATCCAGCCATGCACGCTGCCAGCGGA | |
| | | AATTTACTCCTGGACAAGCGTACTACCTGTTTCAGTGTGGCAGCCC | |
| | | TCACCAACAACGTAGCCTTCCAAACCGTGAAACCAGGCAACTTTAA | |
| | | CAAAGATTTCTACGACTTTGCCGTTTCAAAGGGGTTTTTTAAGGAGG | |
| | | GGAGTTCCGTGGAACTGAAGCACTTTGCACAAGACGGTAAT | |
| | | GCTGCTATAAGCGACTATGATTATTACCGGTATAATCTGCCAACGAT | |
| | | GTGTGATATTAGGCAACTGCTCTTCGTGGTAGAGGTCGTGGACAAA | |
| | | TACTTTGACTGCTACGATGGCGGCTGCATCAATGCTAATCAGGTGA | |
| | | TTGTCAACAATCTCGACAAGAGTGCGGGCTTTCCTTTCAATAAATGG | |
| | | GGCAAGGCCCGCCTCTACTATGACAGCATGAGCTACGAGGACCAA | |
| | | GATGCTCTGTTTGCTTATACAAAGAGAAATGTGATCCCTACCATCAC | |
| | | ACAGATGAACCTTAAATATGCCATCTCCGCGAAGAACCGTGCCCGA | |
| | | ACAGTTGCTGGTGTCTCCATTTGTTCTACCATGACAAACCGCCAGTT | |
| | | CCACCAGAAGCTGTTGAAGAGCATAGCAGCTACTAGGGGCGCCAC | |
| | | CGTCGTAATCGGGACATCCAAGTTTTATGGAGGGTGGCACAACATG | |
| | | CTTAAAACGGTTTACTCAGATGTGGAGAATCCCCACCTAATGGGCT | |
| | | GGGACTACCCCAAGTGTGACCGAGCAATGCCGAACATGCTCCGCA | |
| | | TTATGGCAAGTCTGGTCCTCGCCAGAAAACACACGACTTGCTGCTC | |
| | | ATTGTCACACAGGTTTTATCGTCTGGCCAATGAATGTGCCCAGGTC | |
| | | CTGTCAGAGATGGTCATGTGCGGAGGATCCTTATATGTGAAGCCAG | |
| | | GTGGCACTAGTTCTGGTGATGCCACAACTGCGTACGCAAATAGTGT | |
| | | GTTCAACATCTGCCAGGCTGTCACTGCGAATGTTAATGCGTTGCTG | |
| | | TCCACTGATGGAAACAAAATTGCAGACAAATACGTGCGCAACCTGC | |
| | | AGCATCGTTTATATGAGTGCCTATACAGAAACAGAGATGTGGACAC | |
| | | CGATTTTGTGAACGAGTTCTATGCCTACCTGAGGAAGCATTTCTCAA | |
| | | TGATGATCCTGTCGGATGATGCCGTTGTCTGCTTTAATTCTACTTAT | |
| | | GCTTCACAGGGCCTGGTGGCTTCCATAAAAAACTTCAAGTCTGTGC | |
| | | TGTATTACCAGAACAATGTGTTTATGTCTGAAGCTAAGTGCTGGACC | |
| | | GAGACGGACCTCACCAAGGGTCCCCATGAGTTCTGCTCCCAGCAC | |
| | | ACAATGCTTGTGAAGCAGGGGGACGATTATGTGTATCTCCCTTACC | |
| | | CTGACCCTTCGAGGATACTGGGCGCCGGGTGTTTTGTAGACGACAT | |
| | | TGTCAAAACTGACGGTACTCTAATGATCGAGCGGTTCGTGAGCCTG | |
| | | GCTATTGATGCTTACCCACTGACCAAGCACCCGAATCAAGAGTACG | |
| | | CAGATGTCTTTCACCTTTACCTTCAGTACATTCGGAAGCTTCATGAT | |
| | | GAGCTGACCGGCCACATGCTGGACATGTATTCAGTGATGCTGACAA | |
| | | ATGACAATACATCTAGGTACTGGGAGCCTGAATTTTATGAAGCTATG | |
| | | TATACTCCTCATACCGTGTTGCAGTGATAA | |
| 16 | Nsp13 | ATGGCTGAAAATGTAACAGGACTCTTTAAAGATTGTAGTAAGGTAAT | 370 |
| | | CACTGGGTTACATCCTACACAGGCACCTACACACCTCAGTGTTGAC | |
| | | ACTAAATTCAAAACTGAAGGTTTATGTGTTGACGTACCTGGCATACC | |
| | | TAAGGACATGACCTATAGAAGACTCATCTCTATGATGGGTTTTAAAA | |
| | | TGAATTATCAAGTTAATGGTTACCCTAACATGTTTATCACCCGCGAA | |
| | | GAAGCTATAAGACATGTACGTGCATGGATTGGCTTCGATGTCGAGG | |
| | | GGTGTCATGCTACTAGAGAAGCTGTTGGTACCAATTTACCTTTACAG | |
| | | CTAGGTTTTTCTACAGGTGTTAACCTAGTTGCTGTACCTACAGGTTA | |
| | | TGTTGATACACCTAATAATACAGATTTTTCCAGAGTTAGTGCTAAAC | |
| | | CACCGCCTGGAGATCAATTTAAACACCTCATACCACTTATGTACAAA | |
| | | GGACTTCCTTGGAATGTAGTGCGTATAAAGATTGTACAAATGTTAAG | |
| | | TGACACACTTAAAAATCTCTCTGACAGAGTCGTATTTGTCTTATGGG | |
| | | CACATGGCTTTGAGTTGACATCTATGAAGTATTTTGTGAAAATAGGA | |
| | | CCTGAGCGCACCTGTTGTCTATGTGATAGACGTGCCACATGCTTTT | |
| | | CCACTGCTTCAGACACTTATGCCTGTTGGCATCATTCTATTGGATTT | |
| | | GATTACGTCTATAATCCGTTTATGATTGATGTTCAACAATGGGGTTT | |
| | | TACAGGTAACCTACAAAGCAACCATGATCTGTATTGTCAAGTCCATG | |
| | | GTAATGCACATGTAGCTAGTTGTGATGCAATCATGACTAGGTGTCTA | |
| | | GCTGTCCACGAGTGCTTTGTTAAGCGTGTTGACTGGACTATTGAAT | |
| | | ATCCTATAATTGGTGATGAACTGAAGATTAATGCGGCTTGTAGAAAG | |
| | | GTTCAACACATGGTTGTTAAAGCTGCATTATTAGCAGACAAATTCCC | |
| | | AGTTCTTCACGACATTGGTAACCCTAAAGCTATTAAGTGTGTACCTC | |
| | | AAGCTGATGTAGAATGGAAGTTCTATGATGCACAGCCTTGTAGTGA | |
| | | CAAAGCTTATAAAATAGAAGAATTATTCTATTCTTATGCCACACATTC | |
| | | TGACAAATTCACAGATGGTGTATGCCTATTTGGAATTGCAATGTCG | |
| | | ATAGATATCCTGCTAATTCCATTGTTTGTAGATTTGACACTAGAGTG | |
| | | CTATCTAACCTTAACTTGCCTGGTTGTGATGGTGGCAGTTTGTATGT | |
| | | AAATAAACATGCATTCCACACACCAGCTTTTGATAAAAGTGCTTG | |
| | | TTAATTTAAAACAATTACCATTTTTCTATTACTCTGACAGTCCATGTG | |
| | | AGTCTCATGGAAAACAAGTAGTGTCAGATATAGATTATGTACCACTA | |
| | | AAGTCTGCTACGTGTATAACACGTTGCAATTTAGGTGGTGCTGTCT | |
| | | GTAGACATCATGCTAATGAGTACAGATTGTATCTCGATGCTTATAAC | |
| | | ATGATGATCTCAGCTGGCTTTAGCTTGTGGGTTTACAAACAATTTGA | |
| | | TACTTATAACCTCTGGAACACTTTTACAAGACTTCAGTGATGA | |
| 17 | Nsp | ATGGCTGAGAATGTCACAGGGCTGTTTAAGGACTGTTCCAAGGTGA | 371 |
| | (codon | TAACAGGACTGCACCCAACACAGGCCCCTACGCACTTGTCTGTTGA | |
| | optimized) | CACAAAATTCAAAACAGAAGGACTCTGTGTGGATGTACCCGGCATC | |
| | | CCTAAAGACATGACCTATCGCAGGCTCATCAGTATGATGGGCTTCA | |
| | | AGATGAACTACCAGGTCAATGGCTACCCAAATATGTTCATCACCAG | |
| | | GGAGGAAGCTATTAGGCATGTGAGGGCCTGGATTGGTTTTGACGT | |
| | | GGAAGGCTGTCATGCAACAAGAGAAGCAGTGGGGACCAACTTACC | |
| | | TCTGCAGCTGGGGTTCAGCACTGGGGTCAACCTGGTTGCTGTCCC | |
| | | AACTGGATATGTTGATACCCCCAACAACACAGACTTCTCACGGGTC | |
| | | TCTGCAAAGCCTCCACCTGGGGATCAGTTCAAGCACCTGATCCCAT | |
| | | TAATGTATAAAGGTCTGCCCTGGAATGTGGTAAGGATCAAAATTGTT | |
| | | CAGATGCTGAGTGACACTCTGAAGAACTTGAGTGACAGAGTTGTGT | |
| | | TTGTCCTGTGGGCTCATGGCTTTGAGCTGACCAGCATGAAGTACTT | |
| | | TGTGAAAATTGGACCAGAGAGAACGTGCTGCCTGTGTGACCGACG | |
| | | GGCAACTTGTTTTTCTACCGCATCAGATACTTACGCCTGCTGGCAC | |
| | | CATAGTATCGGCTTTGACTATGTCTACAACCCTTTCATGATTGATGT | |
| | | CCAGCAATGGGGCTTCACAGGAAATTTGCAGTCCAACCACGACCTG | |
| | | TACTGCCAGGTCCATGGGAATGCTCACGTGGCCTCCTGCGATGCTA | |
| | | TCATGACACGATGTCTGGCTGTGCATGAGTGCTTTGTGAAGCGTGT | |
| | | CGACTGGACCATCGAATACCCCATTATTGGCGACGAGCTAAAAATA | |
| | | AATGCAGCGTGTAGAAAAGTGCAGCACATGGTGGTCAAGGCAGCA | |
| | | CTCCTTGCTGACAAGTTTCCAGTATTACATGACATCGGCAACCCAAA | |
| | | GGCCATTAAGTGTGTTCCTCAAGCGGATGTGGAGTGGAAGTTCTAT | |
| | | GATGCCCAGCCGTGCTCTGATAAAGCCTACAAGATAGAAGAACTCT | |
| | | TTTATTCTTACGCTACTCACAGCGACAAATTTACAGATGGAGTTTGC | |
| | | CTCTTCTGGAACTGCAATGTCGATAGATATCCGGCCAACAGCATAG | |
| | | TGTGCCGCTTTGATACGCGCGTGCTATCCAACTTGAACCTCCCGGG | |
| | | TTGTGATGGCGGTTCGCTTTATGTAAATAAACATGCTTTCCACACAC | |
| | | CTGCCTTCGACAAGTCCGCCTTTGTGAATCTGAAACAACTTCCCTTC | |
| | | TTCTACTACAGCGACAGCCCCTGCGAGTCCCACGGGAAGCAGGTG | |
| | | GTGAGTGATATTGACTATGTCCCCCTTAAGTCAGCGACTTGCATCA | |
| | | CTCGCTGTAACCTTGGAGGAGCTGTTTGTCGGCACCACGCGAATGA | |
| | | GTACCGACTCTACCTGGACGCCTATAACATGATGATCTCTGCCGGT | |
| | | TTCTCACTATGGGTATATAAGCAGTTTGATACCTACAATTTGTGGAA | |
| | | CACCTTCACCCGGCTCCAATGATAA | |
| 18 | Or7a/7b | ATGAAAATTATTCTTTTCTTGGCACTGATAACACTCGCTACTTGTGA | 372 |
| | | GCTTTATCACTACCAAGAGTGTGTTAGAGGTACAACAGTACTTTTAA | |
| | | AAGAACCTTGCTCTTCTGGAACATACGAGGGCAATTCACCATTTCAT | |
| | | CCTCTAGCTGATAACAAATTTGCACTGACTTGCTTTAGCACTCAATT | |
| | | TGCTTTTGCTTGTCCTGACGGCGTAAAACACGTCTATCAGTTACGTG | |
| | | CCAGATCAGTTTCACCTAAACTGTTCATCAGACAAGAGGAAGTTCAA | |
| | | GAACTTTACTCTCCAATTTTTCTTATTGTTGCGGCAATAGTGTTTATA | |
| | | ACACTTTGCTTCACACTCAAAAGAAAGACAGAATGTGAACTTTCATT | |
| | | AATTGACTTCTATTTGTGCTTTTTAGCCTTTCTGTTATTCCTTGTTTA | |
| | | ATTATGCTTATTATCTTTTGGTTCTCACTTGAACTGCAAGATCATAAT | |
| | | GAAACTTGTCACGCCTAATGATGA | |
| 19 | Orf7a/7b | ATGAAGATCATTTTGTTTCTAGCATTAATAACTCTAGCCACCTGTGA | 373 |
| | (codon | GCTCTACCACTACCAGGAGTGTGTGAGGGGTACCACTGTACTGCTG | |
| | optimized) | AAGGAGCCCTGCAGCTCTGGAACATATGAAGGCAACAGCCCTTTCC | |
| | | ACCCTTTGGCTGATAACAAGTTTGCTCTTACGTGCTTTTCTACTCAG | |
| | | TTTGCATTTGCCTGCCCAGATGGGGTGAAGCATGTGTATCAGCTGC | |
| | | GAGCGCGCAGTGTTTCCCCAAAACTCTTCATTCGGCAAGAAGAGGT | |
| | | CCAAGAACTGTATAGTCCCATCTTTCTCATTGTGGCTGCCATCGTGT | |
| | | TCATCACACTATGTTTCACCCTGAAAAGAAAAACAGAATGTGAACTT | |
| | | TCATTGATTGACTTCTACCTGTGCTTCCTGGCCTTCCTCTTATTTCTT | |
| | | GTTCTCATCATGCTGATCATCTTCTGGTTCTCCCTGGAGCTGCAGG | |
| | | ACCACAATGAGACCTGCCATGCATGATAATGA | |
| 20 | Membrane | ATGGCAGATTCCAACGGTACTATTACCGTTGAAGAGCTTAAAAAGC | 374 |
| | | TCCTTGAAGAATGGAACCTAGTAATAGGTTTCCTATTCCTTACATGG | |
| | | ATTTGTCTTCTACAATTTGCCTATGCCAACAGGAATAGGTTTTTGTAT | |
| | | ATAATTAAGTTAATTTTCCTCTGGCTGTTATGGCCAGTAACTTTAACT | |
| | | TGTTTTGTGCTTGCTGCTGTTTACAGAATAAATTGGATCACCGGTGG | |
| | | AATTGCTATCGCAATGGCTTGTCTTGTAGGCTTGATGTGGCTCAGC | |
| | | TACTTCATTGCTTCTTTCAGACTGTTTGCGCGTACGCGTTCCATGTG | |
| | | GTCATTTAATCCAGAAACTAACATTCTTCTCAACGTGCCACTCCATG | |
| | | GCACTATTCTGACCAGACCGCTTCTAGAAAGTGAACTCGTAATCGG | |
| | | AGCTGTGATCCTTCGTGGACATCTTCGTATTGCTGGACACCATCTA | |
| | | GGACGCTGTGACATCAAGGACCTGCCTAAAGAAATCACTGTTGCTA | |
| | | CATCACGAACGCTTTCTTATTACAAATTGGGAGCTTCGCAGCGTGTA | |
| | | GCAGGTGACTCAGGTTTTGCTGCATACAGTCGCTACAGGATTGGCA | |
| | | ACTATAAATTAAACACAGACCATTCCAGTAGCAGTGACAATATTGCT | |
| | | TTGCTTGTACAGTAATGATGA | |
| 21 | Membrane | ATGGCTGATTCAAATGGCACCATCACTGTGGAGGAACTGAAGAAGC | 375 |
| | (codon | TCCTTGAGGAGTGGAACCTGGTGATTGGCTTCCTCTTCTTAACCTG | |
| | optimized) | GATCTGCCTGCTGCAGTTTGCTTATGCCAACAGAAATCGCTTCCTG | |
| | | TACATCATCAAGCTCATCTTTCTCTGGCTACTTTGGCCTGTAACTTT | |
| | | GACCTGCTTTGTGCTGGCAGCTGTGTACAGAATCAACTGGATTACT | |
| | | GGAGGAATTGCGATAGCCATGGCCTGTTTAGTGGGGCTCATGTGG | |
| | | CTGAGCTACTTCATCGCTTCCTTCCGGCTGTTTGCCCGAACGAGGA | |
| | | GCATGTGGAGCTTCAACCCAGAAACAAATATCCTGCTTAATGTTCC | |
| | | GCTGCATGGAACCATACTCACCAGGCCTCTATTGGAATCTGAGCTG | |
| | | GTCATTGGAGCTGTCATACTCCGGGGCCATTTGCGAATTGCTGGCC | |
| | | ACCACCTGGGTCGTTGTGACATCAAAGATCTGCCCAAGGAGATCAC | |
| | | AGTGGCCACTTCTAGAACATTGTCTTACTATAAACTTGGGGCGAGT | |
| | | CAGAGGGTTGCAGGTGATTCGGGCTTTGCAGCCTATAGCCGCTATA | |
| | | GGATTGGGAACTACAAACTAAATACAGACCACTCATCCTCCAGTGA | |
| | | CAACATTGCATTGCTTGTCCAATGATAATGA | |
| 22 | Envelope | ATGTACTCATTCGTTTCGGAAGAGATAGGTACGTTAATAGTTAATAG | 376 |
| | | CGTACTTCTTTTTCTTGCTTTCGTGGTATTCTTGCTAGTTACACTAGC | |
| | | CATCCTTACTGCGCTTCGATTGTGTGCGTACTGCTGCAATATTGTTA | |
| | | ACGTGAGTCTTGTAAAACCTTCTTTTTACGTTTACTCTCGTGTTAAAA | |
| | | ATCTGAATTCTTCTAGAGTTCCTGATCTTCTGGTCTAATGATGA | |
| 23 | Envelope | ATGTACAGCTTTGTTAGTGAAGAGATTGGCACTCTAATAGTAAATTC | 377 |
| | (codon | TGTGCTGCTCTTCCTTGCTTTTGTGGTGTTCCTGCTGGTCACCCTG | |
| | optimized) | GCCATCCTCACAGCATTAAGGCTCTGTGCCTACTGCTGCAACATCG | |
| | | TCAATGTGTCTCTGGTGAAACCTTCCTTCTATGTGTATTCACGGGTG | |
| | | AAGAACTTGAACAGCTCCAGAGTTCCAGACTTGCTTGTATGATAATG | |
| | | A | |
| 24 | Nucleo- | ATGTCTGATAATGGACCCCAAAATCAGCGAAATGCACTCCGCATTA | 378 |
| | capsid | CGTTTGGTGGACCCTCAGATTCAACTGGCAGTAACCAGAATGGTGG | |
| | | GGCGCGATCAAAACAACGTCGGCCCCAAGGTTTACCCAATAATACT | |
| | | GCGTCTTGGTTCACCGCTCTCACTCAACATGGCAAGGAAGACCTTA | |
| | | AATTCCCTCGAGGACAAGGCGTTCCAATTAACACCAATAGCAGTCC | |
| | | AGATGACCAAATTGGCTACTACCGAAGAGCTACCAGACGAATTCGT | |
| | | GGTGGTGACGGTAAAATGAAAGATCTCAGTCCAAGATGGTATTTCT | |
| | | ACTACCTAGGAACTGGGCCAGAAGCTGGACTTCCCTATGGTGCTAA | |
| | | CAAAGACGGCATCATATGGGTTGCAACTGAGGGAGCCTTGAATACA | |
| | | CCAAAAGATCACATTGGCACCCGCAATCCTGCTAACAATGCTGCAA | |
| | | TCGTGCTACAACTTCCTCAAGGAACAACATTGCCAAAAGGCTTCTAC | |
| | | GCAGAAGGGAGCAGAGGCGGCAGTCAAGCCTCTTCTCGTTCCTCA | |
| | | TCACGTAGTCGCAACAGTTCAAGAAATTCAACTCCAGGCAGCAGTA | |
| | | AACGAACTTCTCCTGCTAGAATGGCTGGCAATGGCGGTGATGCTGC | |
| | | TCTTGCTTTGCTGCTGCTTGACAGATTGAACCAGCTTGAGAGCAAA | |
| | | ATGTCTGGTAAAGGCCAACAACAACAAGGCCAAACTGTCACTAAGA | |
| | | AATCTGCTGCTGAGGCTTCTAAGAAGCCTCGGCAAAAACGTACTGC | |
| | | CACTAAAGCATACAATGTAACACAAGCTTTCGGCAGACGTGGTCCA | |
| | | GAACAAACCCAAGGAAATTTTGGGGACCAGGAACTAATCAGACAAG | |
| | | GAACTGATTACAAACATTGGCCGCAAATTGCACAATTTGCCCCCAG | |
| | | CGCTTCAGCGTTCTTCGGAATGTCGCGCATTGGCATGGAAGTCACA | |
| | | CCTTCGGGAACGTGGTTGACCTACACAGGTGCCATCAAATTGGATG | |
| | | ACAAAGATCCAAATTTCAAAGATCAAGTCATTTTGCTGAATAAGCAT | |
| | | attgacgcatacaaaacattcccaccaacagagcctaaaaaggaca | |
| | | AAAAGAAGAAGGCTGATGAAACTCAAGCCTTACCGCAGAGACAGAA | |
| | | GAAACAGCAAACTGTGACTCTTCTTCCTGCTGCAGATTTGGATGATT | |
| | | TCTCCAAACAATTGCAACAATCCATGAGCCGTGCTGACTCAACTCA | |
| | | GGCCTAATGATGA | |
| 25 | Nucleo- | ATGTCAGACAATGGGCCCCAGAACCAGAGAAATGCCCTTCGCATCA | 379 |
| | capsid | CGTTTGGTGGCCCTAGTGACAGCACCGGCAGCAATCAGAATGGAG | |
| | (codon | GTGCCCGCAGTAAACAAAGGAGACCACAGGGACTGCCAAACAACA | |
| | optimized) | CAGCATCCTGGTTTACTGCACTTACGCAGCATGGTAAGGAGGACCT | |
| | | GAAGTTCCCAAGAGGACAGGGAGTCCCCATCAACACCAACAGCTC | |
| | | ACCAGATGATCAGATCGGCTATTACCGGCGGGCTACTCGCCGCATA | |
| | | CGAGGGGGCGATGGCAAGATGAAGGATCTAAGTCCGCGTTGGTAC | |
| | | TTCTACTATCTGGGCACAGGGCCTGAAGCTGGCCTGCCTTATGGG | |
| | | GCCAATAAGGATGGCATCATCTGGGTGGCCACTGAGGGGGCTTTG | |
| | | AATACCCCAAAAGACCACATCGGGACTCGAAACCCTGCCAACAATG | |
| | | CAGCCATTGTCCTTCAGCTCCCACAAGGGACAACATTACCCAAGGG | |
| | | CTTCTATGCAGAGGGCTCCAGGGGAGGTTCTCAAGCCAGCAGCCG | |
| | | GAGCAGCTCGCGGTCCCGGAACTCAAGCCGAAATTCCACTCCTGG | |
| | | CAGCTCCAAGAGAACATCACCTGCGAGGATGGCTGGAAATGGAGG | |
| | | CGATGCTGCTCTGGCCCTCCTTTTGCTGGACAGGCTCAACCAGCTG | |
| | | GAGAGTAAAATGAGTGGAAAGGGGCAGCAGCAACAGGGCCAGACT | |
| | | GTGACCAAGAAGTCTGCAGCAGAAGCGTCCAAGAAACCCAGGCAG | |
| | | AAAAGGACAGCCACAAAAGCCTATAATGTGACACAAGCCTTTGGGA | |
| | | GAAGAGGGCCAGAGCAGACCCAGGGAAACTTTGGAGACCAGGAGC | |
| | | TGATTCGTCAAGGTACAGACTACAAGCACTGGCCACAGATTGCTCA | |
| | | GTTTGCTCCCTCTGCATCAGCCTTCTTCGGCATGAGCAGGATAGGT | |
| | | ATGGAGGTGACTCCGAGCGGAACCTGGCTGACCTACACCGGAGCC | |
| | | ATCAAGCTGGATGACAAGGATCCCAACTTCAAGGACCAGGTAATTC | |
| | | TCTTAAACAAGCATATTGATGCCTACAAAACCTTTCCTCCAACAGAA | |
| | | CCCAAAAAGGACAAAAAAAAAAAAGCTGATGAAACTCAGGCCCTAC | |
| | | CTCAGCGGCAAAAGAAACAACAGACGGTTACCCTACTCCCGGCTG | |
| | | CAGATTTGGACGACTTCTCTAAGCAGCTGCAGCAGTCCATGTCCAG | |
| | | AGCTGACTCTACCCAAGCATGATAATGA | |
| 26 | Spike (2- | ATGTTCGTGTTCCTGGTGCTGCTGCCCCTGGTGAGCAGCCAGTGC | 380 |
| | proline | GTGAACCTGATCACCAGGACCCAGAGCTACACCAACAGCTTCACCA | |
| | substitute) | GGGGCGTGTACTACCCCGACAAGGTGTTCAGGAGCAGCGTGCTGC | |
| | | ACAGCACCCAGGACCTGTTCCTGCCCTTCTTCAGCAACGTGACCTG | |
| | | GTTCCACGCCATCAGCGGCACCAACGGCACCAAGAGGTTCGACAA | |
| | | CCCCGTGCTGCCCTTCAACGACGGCGTGTACTTCGCCAGCACCGA | |
| | | GAAGAGCAACATCATCAGGGGCTGGATCTTCGGCACCACCCTGGA | |
| | | CAGCAAGACCCAGAGCCTGCTGATCGTGAACAACGCCACCAACGT | |
| | | GGTGATCAAGGTGTGCGAGTTCCAGTTCTGCAACGACCCCTTCCTG | |
| | | GACGTGTACTACCACAAGAACAACAAGAGCTGGATGGAGAGCGAG | |
| | | TTCAGGGTGTACAGCAGCGCCAACAACTGCACCTTCGAGTACGTGA | |
| | | GCCAGCCCTTCCTGATGGACCTGGAGGGCAAGCAGGGCAACTTCA | |
| | | AGAACCTGAGGGAGTTCGTGTTCAAGAACATCGACGGCTACTTCAA | |
| | | GATCTACAGCAAGCACACCCCCATCAACCTGGGCAGGGACCTGCC | |
| | | CCAGGGCTTCAGCGCCCTGGAGCCCCTGGTGGACCTGCCCATCGG | |
| | | CATCAACATCACCAGGTTCCAGACCCTGCTGGCCCTGCACAGGAG | |
| | | CTACCTGACCCCCGGCGACAGCAGCAGCGGCTGGACCGCCGGCG | |
| | | CCGCCGCCTACTACGTGGGCTACCTGCAGCCCAGGACCTTCCTGC | |
| | | TGAAGTACAACGAGAACGGCACCATCACCGACGCCGTGGACTGCG | |
| | | CCCTGGACCCCCTGAGCGAGACCAAGTGCACCCTGAAGAGCTTCA | |
| | | CCGTGGAGAAGGGCATCTACCAGACCAGCAACTTCAGGGTGCAGC | |
| | | CCACCGAGAGCATCGTGAGGTTCCCCAACATCACCAACCTGTGCC | |
| | | CCTTCGACGAGGTGTTCAACGCCACCAGGTTCGCCAGCGTGTACG | |
| | | CCTGGAACAGGAAGAGGATCAGCAACTGCGTGGCCGACTACAGCG | |
| | | TGCTGTACAACTTCGCCCCCTTCTTCGCCTTCAAGTGCTACGGCGT | |
| | | GAGCCCCACCAAGCTGAACGACCTGTGCTTCACCAACGTGTACGC | |
| | | CGACAGCTTCGTGATCAGGGGCAACGAGGTGAGCCAGATCGCCCC | |
| | | CGGCCAGACCGGCAACATCGCCGACTACAACTACAAGCTGCCCGA | |
| | | CGACTTCACCGGCTGCGTGATCGCCTGGAACAGCAACAAGCTGGA | |
| | | CAGCAAGGTGGGCGGCAACTACAACTACAGGTACAGGCTGTTCAG | |
| | | GAAGAGCAACCTGAAGCCCTTCGAGAGGGACATCAGCACCGAGAT | |
| | | CTACCAGGCCGGCAACAAGCCCTGCAACGGCGTGGCCGGCGTGA | |
| | | ACTGCTACTTCCCCCTGAGGAGCTACGGCTTCAGGCCCACCTACG | |
| | | GCGTGGGCCACCAGCCCTACAGGGTGGTGGTGCTGAGCTTCGAGC | |
| | | TGCTGCACGCCCCCGCCACCGTGTGCGGCCCCAAGAAGAGCACCA | |
| | | ACCTGGTGAAGAACAAGTGCGTGAACTTCAACTTCAACGGCCTGAC | |
| | | CGGCACCGGCGTGCTGACCGAGAGCAACAAGAAGTTCCTGCCCTT | |
| | | CCAGCAGTTCGGCAGGGACATCGCCGACACCACCGACGCCGTGAG | |
| | | GGACCCCCAGACCCTGGAGATCCTGGACATCACCCCCTGCAGCTT | |
| | | CGGCGGCGTGAGCGTGATCACCCCCGGCACCAACACCAGCAACCA | |
| | | GGTGGCCGTGCTGTACCAGGGCGTGAACTGCACCGAGGTGCCCGT | |
| | | GGCCATCCACGCCGACCAGCTGACCCCCACCTGGAGGGTGTACAG | |
| | | CACCGGCAGCAACGTGTTCCAGACCAGGGCCGGCTGCCTGATCGG | |
| | | CGCCGAGTACGTGAACAACAGCTACGAGTGCGACATCCCCATCGG | |
| | | CGCCGGCATCTGCGCCAGCTACCAGACCCAGACCAAGAGCCACCA | |
| | | GCAGGCCCAGAGCGTGGCCAGCCAGAGCATCATCGCCTACACCAT | |
| | | GAGCCTGGGCGCCGAGAACAGCGTGGCCTACAGCAACAACAGCAT | |
| | | CGCCATCCCCACCAACTTCACCATCAGCGTGACCACCGAGATCCTG | |
| | | CCCGTGAGCATGACCAAGACCAGCGTGGACTGCACCATGTACATCT | |
| | | GCGGCGACAGCACCGAGTGCAGCAACCTGCTGCTGCAGTACGGCA | |
| | | GCTTCTGCACCCAGCTGAAGAGGGCCCTGACCGGCATCGCCGTGG | |
| | | AGCAGGACAAGAACACCCAGGAGGTGTTCGCCCAGGTGAAGCAGA | |
| | | TCTACAAGACCCCCCCCATCAAGTACTTCGGCGGCTTCAACTTCAG | |
| | | CCAGATCCTGCCCGACCCCAGCAAGCCCAGCAAGAGGAGCTTCAT | |
| | | CGAGGACCTGCTGTTCAACAAGGTGACCCTGGCCGACGCCGGCTT | |
| | | CATCAAGCAGTACGGCGACTGCCTGGGCGACATCGCCGCCAGGGA | |
| | | CCTGATCTGCGCCCAGAAGTTCAACGGCCTGACCGTGCTGCCCCC | |
| | | CCTGCTGACCGACGAGATGATCGCCCAGTACACCAGCGCCCTGCT | |
| | | GGCCGGCACCATCACCAGCGGCTGGACCTTCGGCGCCGGCGCCG | |
| | | CCCTGCAGATCCCCTTCGCCATGCAGATGGCCTACAGGTTCAACG | |
| | | GCATCGGCGTGACCCAGAACGTGCTGTACGAGAACCAGAAGCTGA | |
| | | TCGCCAACCAGTTCAACAGCGCCATCGGCAAGATCCAGGACAGCC | |
| | | TGAGCAGCACCGCCAGCGCCCTGGGCAAGCTGCAGGACGTGGTG | |
| | | AACCACAACGCCCAGGCCCTGAACACCCTGGTGAAGCAGCTGAGC | |
| | | AGCAAGTTCGGCGCCATCAGCAGCGTGCTGAACGACATCCTGAGC | |
| | | AGGCTGGACCCCCCCGAGGCCGAGGTGCAGATCGACAGGCTGAT | |
| | | CACCGGCAGGCTGCAGAGCCTGCAGACCTACGTGACCCAGCAGCT | |
| | | GATCAGGGCCGCCGAGATCAGGGCCAGCGCCAACCTGGCCGCCA | |
| | | CCAAGATGAGCGAGTGCGTGCTGGGCCAGAGCAAGAGGGTGGACT | |
| | | TCTGCGGCAAGGGCTACCACCTGATGAGCTTCCCCCAGAGCGCCC | |
| | | CCCACGGCGTGGTGTTCCTGCACGTGACCTACGTGCCCGCCCAGG | |
| | | AGAAGAACTTCACCACCGCCCCCGCCATCTGCCACGACGGCAAGG | |
| | | CCCACTTCCCCAGGGAGGGCGTGTTCGTGAGCAACGGCACCCACT | |
| | | GGTTCGTGACCCAGAGGAACTTCTACGAGCCCCAGATCATCACCAC | |
| | | CGACAACACCTTCGTGAGCGGCAACTGCGACGTGGTGATCGGCAT | |
| | | CGTGAACAACACCGTGTACGACCCCCTGCAGCCCGAGCTGGACAG | |
| | | CTTCAAGGAGGAGCTGGACAAGTACTTCAAGAACCACACCAGCCCC | |
| | | GACGTGGACCTGGGCGACATCAGCGGCATCAACGCCAGCGTGGTG | |
| | | AACATCCAGAAGGAGATCGACAGGCTGAACGAGGTGGCCAAGAAC | |
| | | CTGAACGAGAGCCTGATCGACCTGCAGGAGCTGGGCAAGTACGAG | |
| | | CAGTACATCAAGTGGCCCTGGTACATCTGGCTGGGCTTCATCGCCG | |
| | | GCCTGATCGCCATCGTGATGGTGACCATCATGCTGTGCTGCATGAC | |
| | | CAGCTGCTGCAGCTGCCTGAAGGGCTGCTGCAGCTGCGGCAGCTG | |
| | | CTGCAAGTTCGACGAGGACGACAGCGAGCCCGTGCTGAAGGGCGT | |
| | | GAAGCTGCACTACACCTGATGA | |
| 27 | Spike (2- | ATGTTTGTCTTTTTGGTACTCCTCCCTCTTGTCTCGTCTCAGTGTGT | 381 |
| | proline | CAACTTGATTACACGCACTCAAAGTTACACCAACTCCTTTACCCGAG | |
| | substitute) | GAGTCTACTATCCAGATAAAGTGTTCAGATCTAGCGTGTTGCATAGC | |
| | (codon | ACGCAGGATCTCTTTCTCCCGTTTTTCAGCAACGTGACCTGGTTCC | |
| | optimized) | ATGCAATATCTGGCACAAATGGGACCAAGCGGTTTGACAATCCTGT | |
| | | GTTACCGTTCAATGATGGCGTGTACTTCGCCAGTACCGAAAAGTCC | |
| | | AACATCATCAGAGGCTGGATCTTCGGCACAACCCTGGATTCTAAAA | |
| | | CTCAGTCCCTTCTGATAGTCAACAACGCAACCAACGTGGTGATAAA | |
| | | GGTGTGTGAATTCCAGTTTTGTAACGACCCCTTCCTTGACGTTTATT | |
| | | ATCACAAGAATAACAAGAGTTGGATGGAGAGCGAATTTCGGGTATA | |
| | | TTCCTCAGCAAACAACTGCACATTTGAATATGTGAGTCAGCCCTTCC | |
| | | TCATGGACCTCGAAGGAAAGCAAGGCAACTTTAAGAACCTGAGGGA | |
| | | GTTCGTGTTCAAGAACATCGACGGCTATTTAAGATCTACTCTAAGC | |
| | | ACACCCCCATCAATCTTGGCAGAGACCTACCCCAGGGCTTTTCGGC | |
| | | CTTGGAGCCTCTGGTGGATCTCCCCATCGGTATCAACATCACCCGA | |
| | | TTCCAAACTCTCCTGGCACTGCACAGGTCATATCTAACACCCGGGG | |
| | | ACAGCAGCAGTGGGTGGACAGCTGGCGCCGCGGCTTACTATGTTG | |
| | | GCTACCTGCAGCCACGTACCTTCCTGCTGAAATACAATGAAAACGG | |
| | | AACGATTACAGATGCGGTGGACTGTGCACTGGATCCATTGTCTGAA | |
| | | ACTAAATGTACACTAAAATCCTTTACTGTTGAGAAGGGCATCTACCA | |
| | | AACTTCTAATTTCAGGGTTCAGCCCACCGAATCCATCGTTCGCTTCC | |
| | | CCAACATTACTAATCTGTGTCCATTTGATGAAGTGTTTAATGCCACC | |
| | | CGCTTCGCTTCCGTGTATGCATGGAACAGGAAGAGAATCTCAAACT | |
| | | GTGTGGCAGACTATTCTGTTCTGTACAATTTGCTCCTTTCTTTGCC | |
| | | TTCAAGTGCTATGGAGTGTCACCTACAAAGCTCAATGACCTCTGCTT | |
| | | CACAAATGTCTACGCCGATTCTTTTGTGATTCGTGGAAATGAAGTTT | |
| | | CCCAGATCGCACCCGGCCAGACGGGAAACATAGCCGACTACAACT | |
| | | ACAAGCTGCCGGATGACTTCACGGGCTGTGTCATTGCTTGGAATTC | |
| | | AAATAAATTAGATAGTAAAGTGGGGGGGAACTATAATTACCGCTACC | |
| | | GGCTTTTTCGCAAATCAAATTTGAAGCCATTTGAGCGTGATATTTCG | |
| | | ACTGAAATCTATCAGGCTGGGAACAAACCCTGCAACGGGGTAGCA | |
| | | GGAGTCAATTGCTACTTTCCTTTACGCAGCTACGGGTTCCGACCTA | |
| | | CCTATGGTGTGGGCCACCAACCATACAGGGTGGTTGTCTTGTCCTT | |
| | | CGAGCTTCTTCATGCCCCGGCAACGGTGTGCGGTCCTAAAAAGAGT | |
| | | ACCAATCTAGTAAAGAATAAGTGTGTGAACTTTAACTTCAATGGTTT | |
| | | GACCGGCACTGGCGTTTTGACTGAGTCCAACAAGAAGTTCTTACCC | |
| | | TTTCAGCAGTTCGGGCGGGACATCGCCGACACTACAGATGCAGTG | |
| | | CGCGATCCGCAGACACTGGAGATTTTGGACATTACCCCTTGCTCCT | |
| | | TTGGTGGAGTATCTGTAATAACCCCAGGCACGAACACTAGTAATCA | |
| | | AGTCGCCGTGCTGTATCAAGGTGTTAACTGTACCGAGGTGCCTGTG | |
| | | GCTATTCATGCTGACCAGCTCACTCCCACATGGAGAGTCTACTCTA | |
| | | CAGGTAGCAATGTATTTCAAACAAGGGCTGGGTGCCTGATAGGAGC | |
| | | CGAGTACGTGAATAACTCTTATGAGTGTGACATCCCAATCGGAGCT | |
| | | GGGATTTGTGCCTCTTACCAGACCCAGACGAAGTCACACCAGCAG | |
| | | GCTCAATCAGTGGCGTCTCAGAGTATCATCGCCTACACTATGTCCC | |
| | | TCGGAGCAGAAAATTCAGTTGCATACAGCAATAACTCCATCGCCATT | |
| | | CCAACTAACTTCACTATATCGGTGACCACAGAGATCCTGCCAGTCA | |
| | | GCATGACAAAAACATCAGTAGACTGCACCATGTATATATGCGGGGA | |
| | | CAGCACAGAATGTTCTAACCTGCTGTTGCAATATGGGAGCTTCTGC | |
| | | ACTCAGTTGAAGAGGGCTCTGACTGGAATCGCTGTGGAGCAGGAC | |
| | | AAGAATACCCAGGAAGTGTTCGCCCAGGTGAAGCAGATATACAAAA | |
| | | CCCCTCCAATCAAATACTTTGGCGGGTTTAACTTCAGCCAAATTCTG | |
| | | CCCGATCCCTCCAAGCCTAGTAAAAGGTCCTTCATTGAAGATCTGC | |
| | | TGTTCAACAAAGTCACACTGGCAGATGCTGGATTCATCAAGCAGTA | |
| | | TGGTGACTGTCTGGGCGACATCGCAGCGCGGGATCTGATTTGTGC | |
| | | ACAGAAGTTTAATGGGCTTACAGTCTTGCCTCCTCTGCTGACAGAC | |
| | | GAGATGATTGCCCAGTACACGTCTGCCTTGCTCGCTGGTACCATAA | |
| | | CCAGCGGATGGACCTTCGGAGCCGGCGCTGCCCTTCAGATCCCTT | |
| | | TCGCTATGCAGATGGCCTATAGATTTAATGGCATCGGAGTGACTCA | |
| | | GAACGTTCTCTACGAGAATCAGAAACTGATTGCCAACCAGTTTAACA | |
| | | GTGCGATCGGAAAGATTCAAGACAGTCTATCCAGCACGGCTTCTGC | |
| | | ACTGGGTAAACTGCAAGATGTGGTTAACCACAACGCCCAGGCCCTG | |
| | | AACACACTCGTGAAACAGCTCTCTTCCAAGTTCGGTGCCATCAGCT | |
| | | CAGTTCTTAACGATATACTGAGTAGACTAGACCCTCCAGAGGCCGA | |
| | | AGTGCAGATCGACAGGCTTATCACAGGTCGGCTGCAGTCTCTACAA | |
| | | ACCTATGTCACACAACAGTTAATCAGAGCAGCTGAGATCCGAGCTT | |
| | | CCGCGAACCTCGCGGCAACAAAGATGTCTGAGTGCGTCCTGGGGC | |
| | | AGAGCAAGCGGGTAGATTTCTGTGGGAAAGGATACCATCTGATGTC | |
| | | ATTTCCCCAGAGCGCCCCACATGGTGTAGTTTTTCTGCATGTGACC | |
| | | TACGTCCCTGCCCAAGAAAAAAATTTCACTACGGCTCCAGCTATCT | |
| | | GCCACGATGGAAAAGCGCACTTCCCCCGAGAGGGCGTTTTTGTCA | |
| | | GTAATGGTACCCACTGGTTTGTGACACAGAGAAATTTCTATGAGCC | |
| | | ACAGATAATTACTACCGACAACACATTTGTCTCTGGGAATTGTGATG | |
| | | TCGTAATTGGAATTGTGAACAATACAGTATATGATCCATTGCAGCCT | |
| | | GAGCTAGACTCTTTCAAAGAAGAGCTGGATAAATATTTCAAGAACCA | |
| | | TACCTCGCCTGACGTGGACTTGGGGGATATCTCCGGAATAAATGCA | |
| | | TCCGTGGTGAATATCCAGAAGGAAATTGATAGACTGAATGAGGTGG | |
| | | CCAAAAACCTCAATGAGAGTTTGATTGACCTTCAGGAGTTAGGCAA | |
| | | GTATGAACAGTACATTAAGTGGCCATGGTACATCTGGCTGGGTTTC | |
| | | ATTGCCGGCCTCATAGCAATTGTCATGGTGACCATCATGCTCTGCT | |
| | | GCATGACTTCCTGCTGCAGCTGCCTTAAAGGCTGCTGTAGCTGTGG | |
| | | GTCCTGTTGCAAATTTGATGAGGACGACTCAGAGCCGGTGCTGAAG | |
| | | GGAGTTAAATTGCACTACACTTGATAA | |
| 28 | Spike (6 | ATGTTCGTGTTCCTGGTGCTGCTGCCCCTGGTGAGCAGCCAGTGC | 382 |
| | proline | GTGAACCTGATCACCAGGACCCAGAGCTACACCAACAGCTTCACCA | |
| | substitute) | GGGGCGTGTACTACCCCGACAAGGTGTTCAGGAGCAGCGTGCTGC | |
| | | ACAGCACCCAGGACCTGTTCCTGCCCTTCTTCAGCAACGTGACCTG | |
| | | GTTCCACGCCATCAGCGGCACCAACGGCACCAAGAGGTTCGACAA | |
| | | CCCCGTGCTGCCCTTCAACGACGGCGTGTACTTCGCCAGCACCGA | |
| | | GAAGAGCAACATCATCAGGGGCTGGATCTTCGGCACCACCCTGGA | |
| | | CAGCAAGACCCAGAGCCTGCTGATCGTGAACAACGCCACCAACGT | |
| | | GGTGATCAAGGTGTGCGAGTTCCAGTTCTGCAACGACCCCTTCCTG | |
| | | GACGTGTACTACCACAAGAACAACAAGAGCTGGATGGAGAGCGAG | |
| | | TTCAGGGTGTACAGCAGCGCCAACAACTGCACCTTCGAGTACGTGA | |
| | | GCCAGCCCTTCCTGATGGACCTGGAGGGCAAGCAGGGCAACTTCA | |
| | | AGAACCTGAGGGAGTTCGTGTTCAAGAACATCGACGGCTACTTCAA | |
| | | GATCTACAGCAAGCACACCCCCATCAACCTGGGCAGGGACCTGCC | |
| | | CCAGGGCTTCAGCGCCCTGGAGCCCCTGGTGGACCTGCCCATCGG | |
| | | CATCAACATCACCAGGTTCCAGACCCTGCTGGCCCTGCACAGGAG | |
| | | CTACCTGACCCCCGGCGACAGCAGCAGCGGCTGGACCGCCGGCG | |
| | | CCGCCGCCTACTACGTGGGCTACCTGCAGCCCAGGACCTTCCTGC | |
| | | TGAAGTACAACGAGAACGGCACCATCACCGACGCCGTGGACTGCG | |
| | | CCCTGGACCCCCTGAGCGAGACCAAGTGCACCCTGAAGAGCTTCA | |
| | | CCGTGGAGAAGGGCATCTACCAGACCAGCAACTTCAGGGTGCAGC | |
| | | CCACCGAGAGCATCGTGAGGTTCCCCAACATCACCAACCTGTGCC | |
| | | CCTTCGACGAGGTGTTCAACGCCACCAGGTTCGCCAGCGTGTACG | |
| | | CCTGGAACAGGAAGAGGATCAGCAACTGCGTGGCCGACTACAGCG | |
| | | TGCTGTACAACTTCGCCCCCTTCTTCGCCTTCAAGTGCTACGGCGT | |
| | | GAGCCCCACCAAGCTGAACGACCTGTGCTTCACCAACGTGTACGC | |
| | | CGACAGCTTCGTGATCAGGGGCAACGAGGTGAGCCAGATCGCCCC | |
| | | CGGCCAGACCGGCAACATCGCCGACTACAACTACAAGCTGCCCGA | |
| | | CGACTTCACCGGCTGCGTGATCGCCTGGAACAGCAACAAGCTGGA | |
| | | CAGCAAGGTGGGCGGCAACTACAACTACAGGTACAGGCTGTTCAG | |
| | | GAAGAGCAACCTGAAGCCCTTCGAGAGGGACATCAGCACCGAGAT | |
| | | CTACCAGGCCGGCAACAAGCCCTGCAACGGCGTGGCCGGCGTGA | |
| | | ACTGCTACTTCCCCCTGAGGAGCTACGGCTTCAGGCCCACCTACG | |
| | | GCGTGGGCCACCAGCCCTACAGGGTGGTGGTGCTGAGCTTCGAGC | |
| | | TGCTGCACGCCCCCGCCACCGTGTGCGGCCCCAAGAAGAGCACCA | |
| | | ACCTGGTGAAGAACAAGTGCGTGAACTTCAACTTCAACGGCCTGAC | |
| | | CGGCACCGGCGTGCTGACCGAGAGCAACAAGAAGTTCCTGCCCTT | |
| | | CCAGCAGTTCGGCAGGGACATCGCCGACACCACCGACGCCGTGAG | |
| | | GGACCCCCAGACCCTGGAGATCCTGGACATCACCCCCTGCAGCTT | |
| | | CGGCGGCGTGAGCGTGATCACCCCCGGCACCAACACCAGCAACCA | |
| | | GGTGGCCGTGCTGTACCAGGGCGTGAACTGCACCGAGGTGCCCGT | |
| | | GGCCATCCACGCCGACCAGCTGACCCCCACCTGGAGGGTGTACAG | |
| | | CACCGGCAGCAACGTGTTCCAGACCAGGGCCGGCTGCCTGATCGG | |
| | | CGCCGAGTACGTGAACAACAGCTACGAGTGCGACATCCCCATCGG | |
| | | CGCCGGCATCTGCGCCAGCTACCAGACCCAGACCAAGAGCCACCA | |
| | | GCAGGCCCAGAGCGTGGCCAGCCAGAGCATCATCGCCTACACCAT | |
| | | GAGCCTGGGCGCCGAGAACAGCGTGGCCTACAGCAACAACAGCAT | |
| | | CGCCATCCCCACCAACTTCACCATCAGCGTGACCACCGAGATCCTG | |
| | | CCCGTGAGCATGACCAAGACCAGCGTGGACTGCACCATGTACATCT | |
| | | GCGGCGACAGCACCGAGTGCAGCAACCTGCTGCTGCAGTACGGCA | |
| | | GCTTCTGCACCCAGCTGAAGAGGGCCCTGACCGGCATCGCCGTGG | |
| | | AGCAGGACAAGAACACCCAGGAGGTGTTCGCCCAGGTGAAGCAGA | |
| | | TCTACAAGACCCCCCCCATCAAGTACTTCGGCGGCTTCAACTTCAG | |
| | | CCAGATCCTGCCCGACCCCAGCAAGCCCAGCAAGAGGAGCCCCAT | |
| | | CGAGGACCTGCTGTTCAACAAGGTGACCCTGGCCGACGCCGGCTT | |
| | | CATCAAGCAGTACGGCGACTGCCTGGGCGACATCGCCGCCAGGGA | |
| | | CCTGATCTGCGCCCAGAAGTTCAACGGCCTGACCGTGCTGCCCCC | |
| | | CCTGCTGACCGACGAGATGATCGCCCAGTACACCAGCGCCCTGCT | |
| | | GGCCGGCACCATCACCAGCGGCTGGACCTTCGGCGCCGGCCCCG | |
| | | CCCTGCAGATCCCCTTCCCCATGCAGATGGCCTACAGGTTCAACGG | |
| | | CATCGGCGTGACCCAGAACGTGCTGTACGAGAACCAGAAGCTGAT | |
| | | CGCCAACCAGTTCAACAGCGCCATCGGCAAGATCCAGGACAGCCT | |
| | | GAGCAGCACCCCCAGCGCCCTGGGCAAGCTGCAGGACGTGGTGA | |
| | | ACCACAACGCCCAGGCCCTGAACACCCTGGTGAAGCAGCTGAGCA | |
| | | GCAAGTTCGGCGCCATCAGCAGCGTGCTGAACGACATCCTGAGCA | |
| | | GGCTGGACCCCCCCGAGGCCGAGGTGCAGATCGACAGGCTGATC | |
| | | ACCGGCAGGCTGCAGAGCCTGCAGACCTACGTGACCCAGCAGCTG | |
| | | ATCAGGGCCGCCGAGATCAGGGCCAGCGCCAACCTGGCCGCCAC | |
| | | CAAGATGAGCGAGTGCGTGCTGGGCCAGAGCAAGAGGGTGGACTT | |
| | | CTGCGGCAAGGGCTACCACCTGATGAGCTTCCCCCAGAGCGCCCC | |
| | | CCACGGCGTGGTGTTCCTGCACGTGACCTACGTGCCCGCCCAGGA | |
| | | GAAGAACTTCACCACCGCCCCCGCCATCTGCCACGACGGCAAGGC | |
| | | CCACTTCCCCAGGGAGGGCGTGTTCGTGAGCAACGGCACCCACTG | |
| | | GTTCGTGACCCAGAGGAACTTCTACGAGCCCCAGATCATCACCACC | |
| | | GACAACACCTTCGTGAGCGGCAACTGCGACGTGGTGATCGGCATC | |
| | | GTGAACAACACCGTGTACGACCCCCTGCAGCCCGAGCTGGACAGC | |
| | | TTCAAGGAGGAGCTGGACAAGTACTTCAAGAACCACACCAGCCCC | |
| | | GACGTGGACCTGGGCGACATCAGCGGCATCAACGCCAGCGTGGTG | |
| | | AACATCCAGAAGGAGATCGACAGGCTGAACGAGGTGGCCAAGAAC | |
| | | CTGAACGAGAGCCTGATCGACCTGCAGGAGCTGGGCAAGTACGAG | |
| | | CAGTACATCAAGTGGCCCTGGTACATCTGGCTGGGCTTCATCGCCG | |
| | | GCCTGATCGCCATCGTGATGGTGACCATCATGCTGTGCTGCATGAC | |
| | | CAGCTGCTGCAGCTGCCTGAAGGGCTGCTGCAGCTGCGGCAGCTG | |
| | | CTGCAAGTTCGACGAGGACGACAGCGAGCCCGTGCTGAAGGGCGT | |
| | | GAAGCTGCACTACACCTGATGA | |
| 29 | Spike (6 | ATGTTTGTATTCCTGGTACTGCTGCCCCTGGTCAGTAGTCAGTGTG | 383 |
| | proline | TCAATCTGATCACTCGCACGCAAAGTTATACCAATTCCTTCACTCGC | |
| | substitute) | GGTGTCTACTACCCAGACAAGGTGTTTAGGTCCAGCGTGCTCCACA | |
| | (codon | GCACACAAGACTTGTTCTTACCATTTTTCAGTAATGTTACCTGGTTT | |
| | optimized) | CATGCCATCTCCGGCACAAATGGGACCAAGAGGTTCGACAATCCTG | |
| | | TGCTACCCTTCAACGACGGGGTGTACTTTGCTTCCACTGAGAAATC | |
| | | TAATATCATTAGAGGCTGGATCTTTGGTACCACATTAGATTCTAAAA | |
| | | CTCAGTCACTGCTAATTGTGAATAACGCCACGAACGTCGTGATCAA | |
| | | GGTCTGTGAGTTTCAATTCTGCAACGACCCTTTCCTGGATGTCTATT | |
| | | ATCACAAGAACAATAAGAGCTGGATGGAGTCTGAGTTCCGAGTGTA | |
| | | CAGTTCTGCAAACAATTGCACCTTTGAGTACGTAAGTCAGCCTTTTC | |
| | | TCATGGATCTGGAAGGCAAGCAGGGTAATTTCAAGAATCTGCGGGA | |
| | | ATTCGTGTTCAAGAACATTGACGGATATTTCAAAATATATTCAAAGC | |
| | | ATACACCGATTAACTTGGGGCGGGATCTGCCACAAGGGTTTAGTGC | |
| | | CCTGGAGCCCTTGGTGGACTTGCCCATTGGCATCAACATTACCCGT | |
| | | TTTCAGACCCTTCTGGCATTGCACAGGTCTTATCTCACACCTGGGG | |
| | | ATTCCAGCAGTGGCTGGACAGCCGGTGCAGCTGCCTACTACGTGG | |
| | | GCTACCTTCAGCCACGTACATTCCTCCTAAAATATAACGAAAACGG | |
| | | GACCATTACTGATGCAGTCGACTGTGCACTGGACCCACTGTCCGAG | |
| | | ACTAAATGCACATTAAAGAGCTTCACTGTGGAAAAGGGGATTTACCA | |
| | | GACGTCCAACTTCAGGGTTCAGCCCACCGAAAGCATCGTCCGCTTC | |
| | | CCAAATATCACCAACCTGTGTCCCTTTGATGAGGTGTTCAACGCCA | |
| | | CACGTTTTGCTAGCGTCTATGCCTGGAACCGGAAAAGAATCTCGAA | |
| | | CTGTGTGGCAGACTACTCAGTGCTCTACAACTTTGCTCCTTTTTTCG | |
| | | CCTTCAAATGTTACGGCGTTTCACCTACGAAACTGAATGACCTCTGC | |
| | | TTTACCAATGTCTATGCTGATTCATTTGTGATCCGCGGCAATGAGGT | |
| | | CAGTCAAATAGCACCCGGGCAGACTGGGAACATAGCCGATTACAAT | |
| | | TACAAACTACCGGATGACTTCACAGGCTGCGTTATTGCATGGAATT | |
| | | CGAATAAGTTGGACTCAAAGGTTGGAGGAAATTATAACTACCGGTA | |
| | | CAGACTGTTCCGTAAGTCTAATCTGAAGCCCTTCGAACGGGACATT | |
| | | TCCACAGAGATCTACCAGGCTGGAAACAAGCCATGCAATGGCGTG | |
| | | GCAGGTGTGAACTGCTACTTCCCTCTGCGCTCGTATGGGTTTAGAC | |
| | | CCACGTATGGAGTGGGACATCAGCCTTATAGAGTTGTGGTGTTAAG | |
| | | CTTTGAACTGCTTCATGCCCCAGCCACCGTGTGTGGGCCAAAGAAG | |
| | | TCTACTAACCTTGTTAAAAACAAGTGTGTGAATTTTAATTTTAATGGA | |
| | | CTGACCGGAACTGGCGTCCTGACTGAGAGCAACAAGAAATTTCTCC | |
| | | CCTTCCAGCAGTTTGGAAGGGATATTGCTGACACAACCGATGCGGT | |
| | | CCGCGACCCGCAGACGCTTGAAATTCTGGACATCACCCCCTGCTCT | |
| | | TTCGGTGGTGTGTCTGTCATCACGCCTGGCACTAACACATCCAACC | |
| | | AAGTGGCTGTCCTCTATCAGGGAGTTAACTGTACCGAGGTTCCTGT | |
| | | GGCCATCCACGCGGACCAGCTGACTCCAACATGGCGCGTTTACAG | |
| | | CACTGGCTCAAACGTATTCCAGACTCGGGCCGGTTGTTTAATTGGT | |
| | | GCCGAATATGTTAACAACAGTTACGAATGTGATATCCCCATTGGCG | |
| | | CGGGAATCTGTGCGAGCTACCAAACACAGACTAAGTCCCACCAGCA | |
| | | GGCCCAGAGTGTGGCTAGCCAGAGCATCATTGCATACACCATGTCC | |
| | | CTCGGCGCTGAAAATAGTGTTGCTTATTCGAATAATTCCATTGCAAT | |
| | | TCCTACTAACTTCACCATAAGCGTCACGACAGAAATCCTGCCTGTGT | |
| | | CTATGACAAAAACATCCGTCGACTGCACGATGTACATCTGCGGCGA | |
| | | CAGCACAGAGTGCTCAAACCTCCTTCTGCAGTACGGATCTTTCTGT | |
| | | ACACAACTCAAGAGGGCTCTGACAGGGATCGCAGTGGAACAAGAT | |
| | | AAGAATACACAGGAAGTTTTCGCGCAGGTGAAACAGATCTACAAGA | |
| | | CCCCCCCTATTAAGTATTTCGGCGGGTTCAACTTTAGCCAGATTTTG | |
| | | CCAGATCCGAGCAAACCTAGTAAACGATCCCCTATTGAGGACCTGC | |
| | | TCTTTAACAAAGTGACATTGGCAGATGCTGGATTTATCAAACAGTAC | |
| | | GGAGACTGCCTGGGAGACATCGCAGCTCGGGATCTTATCTGTGCA | |
| | | CAGAAGTTCAATGGTCTTACAGTGCTTCCTCCACTTCTGACAGACG | |
| | | AGATGATCGCTCAGTATACAAGTGCTCTCCTTGCGGGCACAATAAC | |
| | | TAGCGGATGGACGTTTGGGGCTGGACCTGCGCTACAGATCCCATTT | |
| | | CCAATGCAGATGGCCTACAGATTCAACGGGATAGGTGTTACTCAGA | |
| | | ATGTCCTCTATGAGAACCAGAAATTAATTGCCAACCAGTTCAACTCC | |
| | | GCAATCGGGAAGATCCAGGATTCACTCTCCAGCACCCCTTCTGCCC | |
| | | TTGGTAAATTACAAGATGTGGTTAATCATAACGCCCAAGCCCTCAAT | |
| | | ACACTAGTGAAGCAACTCAGTAGTAAGTTTGGAGCAATATCATCTGT | |
| | | GCTAAATGATATCTTGTCTCGGTTGGACCCACCTGAGGCAGAAGTG | |
| | | CAGATAGACAGGCTCATCACTGGGAGGTTACAATCACTTCAGACCT | |
| | | ATGTCACTCAACAGCTCATCCGAGCTGCCGAGATTAGAGCTAGCGC | |
| | | CAACCTCGCTGCCACCAAAATGTCTGAATGTGTGTTGGGGCAGTCT | |
| | | AAACGAGTTGACTTTTGTGGCAAGGGCTACCACCTGATGAGCTTTC | |
| | | CCCAGTCAGCACCACATGGGGTAGTTTTTTTGCATGTCACCTACGT | |
| | | ACCCGCCCAGGAGAAGAATTTCACGACCGCTCCCGCTATATGCCAT | |
| | | GACGGCAAGGCCCACTTTCCAAGAGAGGGAGTGTTCGTTAGCAAC | |
| | | GGAACCCACTGGTTCGTAACTCAGAGAAACTTCTACGAACCACAGA | |
| | | TCATCACTACCGATAACACCTTCGTGTCTGGAAACTGTGACGTGGT | |
| | | GATTGGTATAGTCAACAACACAGTATATGATCCCCTCCAACCGGAG | |
| | | CTCGATTCATTTAAGGAGGAGCTGGACAAGTACTTTAAAAATCACAC | |
| | | TTCGCCGGACGTCGACCTTGGTGATATTTCAGGGATCAATGCCTCC | |
| | | GTAGTAAACATACAGAAGGAAATTGACCGATTGAATGAGGTAGCGA | |
| | | AAAACCTGAATGAGTCCCTGATAGATCTCCAGGAGCTTGGCAAATA | |
| | | TGAACAGTATATTAAGTGGCCGTGGTACATCTGGCTGGGCTTCATC | |
| | | GCCGGCCTGATAGCCATTGTGATGGTGACAATCATGCTGTGCTGCA | |
| | | TGACCTCTTGCTGCAGCTGCCTGAAGGGCTGCTGTAGTTGTGGGTC | |
| | | CTGTTGCAAGTTTGATGAGGATGATAGCGAGCCAGTCCTGAAAGGA | |
| | | GTGAAGCTGCACTATACTTGATAA | |

[0256] In some embodiments, the large sequences are not limited to the above-mentioned conserved fragments.

[0257] In certain embodiments, the large sequence comprises spike glycoprotein (S) or a portion thereof (e.g., the RBD), nucleoprotein or a portion thereof, membrane protein or a portion thereof, and/or ORF1a/b or a portion thereof (see Table 9, SEQ ID NO: 139). In certain embodiments, the large sequence comprises Spike glycoprotein (S) or a portion thereof (e.g., the RBD), Nucleoprotein or a portion thereof, and ORF1a/b or a portion thereof. In further embodiments, the large sequence comprises Spike glycoprotein (S) or a portion thereof (e.g., the RBD), and Nucleocapsid protein or a portion thereof (see Table. 9, SEQ ID NO: 140).

[0258] As will be discussed herein, in certain embodiments, the vaccine composition comprises whole spike protein, one or more coronavirus CD4+ T cell target epitopes; and one or more coronavirus CD8+ T cell target epitopes. In certain embodiments, the vaccine composition comprises at least a portion of the spike protein (e.g., wherein the portion comprises a trimerized SARS-CoV-2 receptor-binding domain (RBD)), one or more coronavirus CD4+ T cell target epitopes; and one or more coronavirus CD8+ T cell target epitopes. In some embodiments, the one or more coronavirus CD4+ T cell target epitopes; and one or more coronavirus CD8+ T cell target epitopes are in the form of a large sequence.

[0259] In some embodiments, the large sequence(s) are derived from a full-length spike glycoprotein. In other embodiments, the large sequence(s) are derived from a portion of the spike glycoprotein. In some embodiments, the transmembrane anchor of the spike protein has an intact S1-S2 cleavage site. In some embodiments, the spike protein is in its stabilized conformation. In some embodiments, the spike protein is stabilized with proline substitutions at amino acid positions 986 and 987 at the top of the central helix in the S2 subunit. In some embodiments, the composition comprises a SARS-CoV-2 receptor-binding domain (RBD). In some embodiments, the composition comprises a trimerized SARS-CoV-2 receptor-binding domain (RBD). In some embodiments, the trimerized SARS-CoV-2 receptor-binding domain (RBD) sequence is modified by the addition of a T4 fibritin-derived foldon trimerization domain. In some embodiments, the addition of a T4 fibritin-derived foldon trimerization domain increases immunogenicity by multivalent display.

[0260] In some embodiments, the spike protein comprises Tyr-489 and Asn-487 (e.g., Tyr-489 and Asn-487 help with interaction with Tyr 83 and Gln-24 on ACE-2). In some embodiments, the spike protein comprises Gln-493 (e.g., Gln-493 helps with interaction with Glu-35 and Lys-31 on ACE-2). In some embodiments, the spike protein comprises Tyr-505 (e.g., Tyr-505 helps with interaction with Glu-37 and Arg-393 on ACE-2). In some embodiments, the composition comprises a mutation 682-RRAR-685→682-QQAQ-685 in the S1-S2 cleavage site.

[0261] In some embodiments, the spike protein comprising the large sequence(s) comprises at least one proline substitution. In some embodiments, the spike protein comprising the large sequence(s) comprises at least two proline substitutions. For example, the proline substitution may be at position K986 and V987.

[0262] Non-limiting examples of Spike protein sequences are disclosed in Table 2.

TABLE 2

| | | SEQ ID |
|---|---|---|
| | Sequence: | NO: |
| SARS-CoV-like | SQCVNLTTRTQLPPAYTNSFTRGVYYPDKVFRSSVLHSTQDLFLPF | 186 |
| Spike-S1-NTD | FSNVTWFHAIHVSGTNGTKRFDNPVLPFNDGVYFASTEKSNIIRGW | |
| 13 bp-304 bp | FGTTLDSKTQSLLIVNNATNVVIKVCEFQFCNDPFLGVYYHKNNKSW | |
| | MESEFRVYSSANNCTFEYVSQPFLMDLEGKQGNFKNLREFVFKNID | |
| | GYFKIYSKHTPINLVRDLPQGFSALEPLVDLPIGINITRFQTLLALHR | |
| | SYLTPGDSSSGWTAGAAAYYVGYLQPRTFLLKYNENGTITDAVDCAL | |
| | DPLSETKCTLK | |
| SARS-CoV-2 | RVQPTESIVRFPNITNLCPFGEVFNATRFASVYAWNRKRISNCVADY | 187 |
| Spike-S-RBD | SVLYNSASFSTFKCYGVSPTKLNDLCFTNVYADSFVIRGDEVRQIAP | |
| 319 bp-541 bp | GQTGKIADYNYKLPDDFTGCVIAWNSNNLDSKVGGNYNYLYRLFRK | |
| | SNLKPFERDISTEIYQAGSTPCNGVEGFNCYFPLQSYGFQPTNGVG | |
| | YQPYRVWVLSFELLHAPATVCGPKKSTNLVKNKCVNF | |
| CoV Spike S1- | FNGLTGTGVLTESNKKFLPFQQFGRDIADTTDAVTRAGCLIGAEHVN | 188 |
| S2_S2 | NSYECDIPIGAGICASYQTQTNRDPQTLEILDITPCSFGGVSVITPGT | |
| 543 bp-1, 208 bp | NTSNQVAVLYQDVNCTEVPVAIHADQLTPTWRVYSTGSNVFQSPR | |
| | RARSVASQSIIAYTMSLGAENSVAYSNNSIAIPTNFTISVTTEILPVSM | |
| | TKTSVDCTMYICGDSTECSNLLLQYGSFCTQLNRALTGIAVEQDKNT | |
| | QEVFAQVKQIYKTPPIKDFGGFNFSQILPDPSKPSKRSFIEDLLFNKV | |
| | TLADAGFIKQYGDCLGDIAARDLICAQKFNGLTVLPPLLTDEMIAQYT | |
| | SALLAGTITSGWTFGAGAALQIPFAMQMAYRFNGIGVTQNVLYENQ | |
| | KLIANQFNSAIGKIQDSLSSTASALGKLQDWNQNAQALNTLVKQLS | |
| | SNFGAISSVLNDILSRLDKVEAEVQIDRLITGRLQSLQTYVTQQLIRAA | |
| | EIRASANLAATKMSECVLGQSKRVDFCGKGYHLMSFPQSAPHGW | |
| | FLHVTYVPAQEKNFTTAPAICHDGKAHFPREGVFVSNGTHWFVTQR | |
| | NFYEPQIITTDNTFVSGNCDWIGIVNNTVYDPLQPELDSFKEELDKY | |
| | FKNHTSPDVDLGDISGINASWNIQKEIDRLNEVAKNLNESLIDLQEL | |
| | GKYEQ | |
| spike glycoprotein | MFVFLVLLPLVSSQCVNLTTRTQLPPAYTNSFTRGVYYPDKVFRSS | 189 |
| with a mutation | VLHSTQDLFLPFFSNVTWFHAIHVSGTNGTKRFDNPVLPFNDGVYF | |
| 682-RRAR-685- | ASTEKSNIIRGWIFGTTLDSKTQSLLIVNNATNWIKVCEFQFCNDPF | |
| 682-QQAQ-685 in | LGVYYHKNNKSWMESEFRVYSSANNCTFEYVSQPFLMDLEGKQG | |
| the S1-S2 | NFKNLREFVFKNIDGYFKIYSKHTPINLVRDLPQGFSALEPLVDLPIGI | |
| cleavage site | NITRFQTLLALHRSYLTPGDSSSGWTAGAAAYYVGYLQPRTFLLKY | |
| | NENGTITDAVDCALDPLSETKCTLKSFTVEKGIYQTSNFRVQPTESIV | |
| | RFPNITNLCPFGEVFNATRFASVYAWNRKRISNCVADYSVLYNSAS | |
| | FSTFKCYGVSPTKLNDLCFTNVYADSFVIRGDEVRQIAPGQTGKIAD | |
| | YNYKLPDDFTGCVIAWNSNNLDSKVGGNYNYLYRLFRKSNLKPFER | |
| | DISTEIYQAGSTPCNGVEGFNCYFPLQSYGFQPTNGVGYQPYRVV | |
| | LSFELLHAPATVCGPKKSTNLVKNKCVNFNFNGLTGTGVLTESNKK | |
| | FLPFQQFGRDIADTTDAVTRAGCLIGAEHVNNSYECDIPIGAGICASY | |
| | QTQTNRDPQTLEILDITPCSFGGVSVITPGTNTSNQVAVLYQDVNCT | |
| | EVPVAIHADQLTPTWRVYSTGSNVFQSPQQAQSVASQSIIAYTMSL | |
| | GAENSVAYSNNSIAIPTNFTISVTTEILPVSMTKTSVDCTMYICGDST | |
| | ECSNLLLQYGSFCTQLNRALTGIAVEQDKNTQEVFAQVKQIYKTPPI | |
| | KDFGGFNFSQILPDPSKPSKRSFIEDLLFNKVTLADAGFIKQYGDCL | |
| | GDIAARDLICAQKFNGLTVLPPLLTDEMIAQYTSALLAGTITSGWTFG | |
| | AGAALQIPFAMQMAYRFNGIGVTQNVLYENQKLIANQFNSAIGKIQD | |
| | SLSSTASALGKLQDVVNQNAQALNTLVKQLSSNFGAISSVLNDILSR | |
| | LDKVEAEVQIDRLITGRLQSLQTYVTOQLIRAAEIRASANLAATKMSE | |
| | CVLGQSKRVDFCGKGYHLMSFPQSAPHGVVFLHVTYVPAQEKNFT | |
| | TAPAICHDGKAHFPREGVFVSNGTHWFVTQRNFYEPQIITTDNTFVS | |
| | GNCDWIGIVNNTVYDPLQPELDSFKEELDKYFKNHTSPDVDLGDIS | |
| | GINASVNIQKEIDRLNEVAKNLNESLIDLQELGKYEQYIKWPWIWL | |
| | GFIAGLIAIVMVTIMLCCMTSCCSCLKGCCSCGSCCKFDEDDSEPVL | |
| | KGVKLHYT | |
| spike glycoprotein | MFVFLVLLPLVSSQCVNLTTRTQLPPAYTNSFTRGVYYPDKVFRSS | 190 |
| with two proline | VLHSTQDLFLPFFSNVTWFHAIHVSGTNGTKRFDNPVLPFNDGVYF | |
| substitutions | ASTEKSNIIRGWIFGTTLDSKTQSLLIVNNATNWIKVCEFQFCNDPF | |
| (K986P, V987P) | LGVYYHKNNKSWMESEFRVYSSANNCTFEYVSQPFLMDLEGKQG | |
| | NFKNLREFVFKNIDGYFKIYSKHTPINLVRDLPQGFSALEPLVDLPIGI | |
| | NITRFQTLLALHRSYLTPGDSSSGWTAGAAAYYVGYLQPRTFLLKY | |
| | NENGTITDAVDCALDPLSETKCTLKSFTVEKGIYQTSNFRVQPTESIV | |
| | RFPNITNLCPFGEVFNATRFASVYAWNRKRISNCVADYSVLYNSAS | |
| | FSTFKCYGVSPTKLNDLCFTNVYADSFVIRGDEVRQIAPGQTGKIAD | |
| | YNYKLPDDFTGCVIAWNSNNLDSKVGGNYNYLYRLFRKSNLKPFER | |
| | DISTEIYQAGSTPCNGVEGFNCYFPLQSYGFQPTNGVGYQPYRWV | |
| | LSFELLHAPATVCGPKKSTNLVKNKCVNFNFNGLTGTGVLTESNKK | |
| | FLPFQQFGRDIADTTDAVRDPQTLEILDITPCSFGGVSVITPGTNTSN | |
| | QVAVLYQDVNCTEVPVAIHADQLTPTWRVYSTGSNVFQTRAGCLIG | |
| | AEHVNNSYECDIPIGAGICASYQTQTNSPRRARSVASQSIIAYTMSL | |
| | GAENSVAYSNNSIAIPTNFTISVTTEILPVSMTKTSVDCTMYICGDST | |
| | ECSNLLLQYGSFCTQLNRALTGIAVEQDKNTQEVFAQVKQIYKTPPI | |
| | KDFGGFNFSQILPDPSKPSKRSFIEDLLFNKVTLADAGFIKQYGDCL | |
| | GDIAARDLICAQKFNGLTVLPPLLTDEMIAQYTSALLAGTITSGWTFG | |
| | AGAALQIPFAMQMAYRFNGIGVTQNVLYENQKLIANQFNSAIGKIQD | |
| | SLSSTASALGKLQDVVNQNAQALNTLVKQLSSNFGAISSVLNDILSR | |
| | LDPPEAEVQIDRLITGRLQSLQTYVTQQLIRAAEIRASANLAATKMSE | |
| | CVLGQSKRVDFCGKGYHLMSFPQSAPHGVVFLHVTYVPAQEKNFT | |
| | TAPAICHDGKAHFPREGVFVSNGTHWFVTQRNFYEPQIITTDNTFVS | |
| | GNCDWIGIVNNTVYDPLQPELDSFKEELDKYFKNHTSPDVDLGDIS | |
| | GINASVNIQKEIDRLNEVAKNLNESLIDLQELGKYEQYIKWPWYIWL | |
| | GFIAGLIAIVMVTIMLCCMTSCCSCLKGCCSCGSCCKFDEDDSEPVL | |
| | KGVKLHYT | |
| spike glycoprotein | MFVFLVLLPLVSSQCVNLTTRTQLPPAYTNSFTRGVYYPDKVFRSS | 191 |
| with four proline | VLHSTQDLFLPFFSNVTWFHAIHVSGTNGTKRFDNPVLPFNDGVYF | |
| substitutions | ASTEKSNIIRGWIFGTTLDSKTQSLLIVNNATNVVIKVCEFQFCNDPF | |
| (F817P, A892P, | LGVYYHKNNKSWMESEFRVYSSANNCTFEYVSQPFLMDLEGKQG | |
| A899P, A942P) | NFKNLREFVFKNIDGYFKIYSKHTPINLVRDLPQGFSALEPLVDLPIGI | |
| | NITRFQTLLALHRSYLTPGDSSSGWTAGAAAYYVGYLQPRTFLLKY | |
| | NENGTITDAVDCALDPLSETKCTLKSFTVEKGIYQTSNFRVQPTESIV | |
| | RFPNITNLCPFGEVFNATRFASVYAWNRKRISNCVADYSVLYNSAS | |
| | FSTFKCYGVSPTKLNDLCFTNVYADSFVIRGDEVRQIAPGQTGKIAD | |
| | YNYKLPDDFTGCVIAWNSNNLDSKVGGNYNYLYRLFRKSNLKPFER | |
| | DISTEIYQAGSTPCNGVEGFNCYFPLQSYGFQPTNGVGYQPYRV | |
| | LSFELLHAPATVCGPKKSTNLVKNKCVNFNFNGLTGTGVLTESNKK | |
| | FLPFQQFGRDIADTTDAVTRAGCLIGAEHVNNSYECDIPIGAGICASY | |
| | QTQTNRDPQTLEILDITPCSFGGVSVITPGTNTSNQVAVLYQDVNCT | |
| | EVPVAIHADQLTPTWRVYSTGSNVFQSPRRARSVASQSIIAYTMSL | |
| | GAENSVAYSNNSIAIPTNFTISVTTEILPVSMTKTSVDCTMYICGDST | |
| | ECSNLLLQYGSFCTQLNRALTGIAVEQDKNTQEVFAQVKQIYKTPPI | |
| | KDFGGFNFSQILPDPSKPSKRSPIEDLLFNKVTLADAGFIKQYGDCL | |
| | GDIAARDLICAQKFNGLTVLPPLLTDEMIAQYTSALLAGTITSGWTFG | |
| | AGPALQIPFPMQMAYRFNGIGVTQNVLYENQKLIANQFNSAIGKIQD | |
| | SLSSTPSALGKLQDVVNQNAQALNTLVKQLSSNFGAISSVLNDILSR | |
| | LDKVEAEVQIDRLITGRLQSLQTYVTQQLIRAAEIRASANLAATKMSE | |
| | CVLGQSKRVDFCGKGYHLMSFPQSAPHGVVFLHVTYVPAQEKNFT | |
| | TAPAICHDGKAHFPREGVFVSNGTHWFVTQRNFYEPQIITTDNTFVS | |
| | GNCDWIGIVNNTVYDPLQPELDSFKEELDKYFKNHTSPDVDLGDIS | |
| | GINASVNIQKEIDRLNEVAKNLNESLIDLQELGKYEQYIKWPWYIWL | |
| | GFIAGLIAIVMVTIMLCCMTSCCSCLKGCCSCGSCCKFDEDDSEPVL | |
| | KGVKLHYT | |
| spike glycoprotein | MFVFLVLLPLVSSQCVNLTTRTQLPPAYTNSFTRGVYYPDKVFRSS | 192 |
| with six proline | VLHSTQDLFLPFFSNVTWFHAIHVSGTNGTKRFDNPVLPFNDGVYF | |
| substitutions | ASTEKSNIIRGWIFGTTLDSKTQSLLIVNNATNWIKVCEFQFCNDPF | |
| (F817P, A892P, | LGVYYHKNNKSWMESEFRVYSSANNCTFEYVSQPFLMDLEGKQG | |
| A899P, A942P, | NFKNLREFVFKNIDGYFKIYSKHTPINLVRDLPQGFSALEPLVDLPIGI | |
| K986P, V987P) | NITRFQTLLALHRSYLTPGDSSSGWTAGAAAYYVGYLQPRTFLLKY | |
| | NENGTITDAVDCALDPLSETKCTLKSFTVEKGIYQTSNFRVQPTESIV | |
| | RFPNITNLCPFGEVFNATRFASVYAWNRKRISNCVADYSVLYNSAS | |
| | FSTFKCYGVSPTKLNDLCFTNVYADSFVIRGDEVRQIAPGQTGKIAD | |
| | YNYKLPDDFTGCVIAWNSNNLDSKVGGNYNYLYRLFRKSNLKPFER | |
| | DISTEIYQAGSTPCNGVEGFNCYFPLQSYGFQPTNGVGYQPYRWV | |
| | LSFELLHAPATVCGPKKSTNLVKNKCVNFNFNGLTGTGVLTESNKK | |
| | FLPFQQFGRDIADTTDAVTRAGCLIGAEHVNNSYECDIPIGAGICASY | |
| | QTQTNRDPQTLEILDITPCSFGGVSVITPGTNTSNQVAVLYQDVNCT | |
| | EVPVAIHADQLTPTWRVYSTGSNVFQSPRRARSVASQSIIAYTMSL | |
| | GAENSVAYSNNSIAIPTNFTISVTTEILPVSMTKTSVDCTMYICGDST | |
| | ECSNLLLQYGSFCTQLNRALTGIAVEQDKNTQEVFAQVKQIYKTPPI | |
| | KDFGGFNFSQILPDPSKPSKRSPIEDLLFNKVTLADAGFIKQYGDCL | |
| | GDIAARDLICAQKFNGLTVLPPLLTDEMIAQYTSALLAGTITSGWTFG | |
| | AGPALQIPFPMQMAYRFNGIGVTQNVLYENQKLIANQFNSAIGKIQD | |
| | SLSSTPSALGKLQDVVNQNAQALNTLVKQLSSNFGAISSVLNDILSR | |
| | LDPPEAEVQIDRLITGRLQSLQTYVTQQLIRAAEIRASANLAATKMSE | |
| | CVLGQSKRVDFCGKGYHLMSFPQSAPHGVVFLHVTYVPAQEKNFT | |
| | TAPAICHDGKAHFPREGVFVSNGTHWFVTQRNFYEPQIITTDNTFVS | |
| | GNCDWIGIVNNTVYDPLQPELDSFKEELDKYFKNHTSPDVDLGDIS | |
| | GINASWNIQKEIDRLNEVAKNLNESLIDLQELGKYEQYIKWPWYIWL | |
| | GFIAGLIAIVMVTIMLCCMTSCCSCLKGCCSCGSCCKFDEDDSEPVL | |
| | KGVKLHYT | |
| spike glycoprotein | MFVFLVLLPLVSSQCVNLTTRTQLPPAYTNSFTRGVYYPDKVFRSS | 193 |
| with six proline | VLHSTQDLFLPFFSNVTWFHAIHVSGTNGTKRFDNPVLPFNDGVYF | |
| substitutions | ASTEKSNIIRGWIFGTTLDSKTQSLLIVNNATNWIKVCEFQFCNDPF | |
| (F817P, A892P, | LGVYYHKNNKSWMESEFRVYSSANNCTFEYVSQPFLMDLEGKQG | |
| A899P, A942P, | NFKNLREFVFKNIDGYFKIYSKHTPINLVRDLPQGFSALEPLVDLPIGI | |
| K986P, V987P) | NITRFQTLLALHRSYLTPGDSSSGWTAGAAAYYVGYLQPRTFLLKY | |
| and a 682-RRAR- | NENGTITDAVDCALDPLSETKCTLKSFTVEKGIYQTSNFRVQPTESIV | |
| 685 - 682-QQAQ- | RFPNITNLCPFGEVFNATRFASVYAWNRKRISNCVADYSVLYNSAS | |
| 685 mutation | FSTFKCYGVSPTKLNDLCFTNVYADSFVIRGDEVRQIAPGQTGKIAD | |
| | YNYKLPDDFTGCVIAWNSNNLDSKVGGNYNYLYRLFRKSNLKPFER | |
| | DISTEIYQAGSTPCNGVEGFNCYFPLQSYGFQPTNGVGYQPYRVV | |
| | LSFELLHAPATVCGPKKSTNLVKNKCVNFNFNGLTGTGVLTESNKK | |
| | FLPFQQFGRDIADTTDAVTRAGCLIGAEHVNNSYECDIPIGAGICASY | |
| | QTQTNRDPQTLEILDITPCSFGGVSVITPGTNTSNQVAVLYQDVNCT | |
| | EVPVAIHADQLTPTWRVYSTGSNVFQSPQQAQSVASQSIIAYTMSL | |
| | GAENSVAYSNNSIAIPTNFTISVTTEILPVSMTKTSVDCTMYICGDST | |
| | ECSNLLLQYGSFCTQLNRALTGIAVEQDKNTQEVFAQVKQIYKTPPI | |
| | KDFGGFNFSQILPDPSKPSKRSPIEDLLFNKVTLADAGFIKQYGDCL | |
| | GDIAARDLICAQKFNGLTVLPPLLTDEMIAQYTSALLAGTITSGWTFG | |
| | AGPALQIPFPMQMAYRFNGIGVTQNVLYENQKLIANQFNSAIGKIQD | |
| | SLSSTPSALGKLQDVVNQNAQALNTLVKQLSSNFGAISSVLNDILSR | |
| | LDPPEAEVQIDRLITGRLQSLQTYVTQQLIRAAEIRASANLAATKMSE | |
| | CVLGQSKRVDFCGKGYHLMSFPQSAPHGVVFLHVTYVPAQEKNFT | |
| | TAPAICHDGKAHFPREGVFVSNGTHWFVTQRNFYEPQIITTDNTFVS | |
| | GNCDWIGIVNNTVYDPLQPELDSFKEELDKYFKNHTSPDVDLGDIS | |
| | GINASWNIQKEIDRLNEVAKNLNESLIDLQELGKYEQYIKWPWYIWL | |
| | GFIAGLIAIVMVTIMLCCMTSCCSCLKGCCSCGSCCKFDEDDSEPVL | |
| | KGVKLHYT | |
| Wild type native | MFVFLVLLPLVSS | 63 |
| leader sequence | | |

[0263] Depending on the specific mutation and wherein the genome the nucleotide substitution, addition or deletion occurs, mutations may be neutral, beneficial, or harmful to an organism. Spike (S) protein of SARS-CoV-2 is 1273 amino acids long and is the main target of current COVID-19 vaccines, as well as those in development. It is the portion of the virus that recognizes and binds to host cellular receptors and mediates viral entry. SARS-CoV-2 is unable to infect host cells without it. Because of this, mutations in the S gene, particularly those that affect portions of the protein that are critical for pathogenesis and normal function (such as the receptor-binding domain (RBD) or furin cleavage site) or those that cause conformational changes to the S protein, are of the most significant interest. If “first-wave” antibodies do not recognize these changes, these mutations may provide an avenue for the virus to escape from immunity to the original SARS-CoV-2 strain. In the current study, using robust immunoinformatic approaches, potential human B cell, CD8⁺, and CD4⁺ T cell-specific epitopes were identified in context to a spike glycoprotein region substituted with all the known 36 non-synonymous mutations that constitute the 17 SARS-CoV-2 specific Variants of Concern (VOC). Usage of these epitopes in a multi-epitope vaccine candidate will aid in combating a higher degree of hospitalization and deaths caused due to the highly severe SARS-CoV-2 VOCs and bring a curb on the pandemic.

[0264] In some embodiments, the one or more large sequences are derived from a whole protein sequence expressed by SARS-CoV-2. In some embodiments, the one or more large sequences are derived from a partial protein sequence expressed by SARS-CoV-2. In other embodiments, the one or more large conserved sequences is derived from a full-length spike glycoprotein. In some embodiments, the one or more large conserved sequences is derived from a partial spike glycoprotein. In some embodiments the spike (S) protein comprises at least one proline substitution, or at least two proline substitution, or at least, four proline substitution, or at least six proline substitution. The spike (S) protein may comprise two consecutive proline substitutions at amino acid positions 986 and 987. The proline substitutions may comprise K986P and V987P mutations. In further embodiments, the spike (S) protein is receptor-binding domain (RBD). In some embodiments, the RBD comprises a trimerized SARS-CoV-2 receptor-binding domain (RBD).

[0265] As previously discussed, each of the large sequences are separated by a linker. In some embodiments, the linker is the same linker. In some embodiments, one or more linkers are different. For example, in some embodiments, a different linker is used between each large sequence. As previously discussed, non-limiting examples of linkers include T2A, E2A, P2A, or the like.

[0266] As previously discussed, in certain embodiments, the vaccine delivery system comprises an adenovirus such as but not limited to Ad5. Ad26, Ad35, etc., as well as carriers such as lipid nanoparticles, polymers, peptides, etc.

### CD8+ Epitopes

[0267] Examples of methods for identifying potential CD8+ T cell epitopes and screening conservancy of potential CD8+ T cell epitopes are described herein. The present invention is not limited to the particular software systems disclosed, and other software systems are accessible to one of ordinary skill in the art for such methods. The present invention is not limited to the specific haplotypes used herein. For example, one of ordinary skill in the art may select alternative molecules (e.g., HLA molecules) for molecular docking studies,

[0268] FIG. 10 shows sequence homology analysis for screening conservancy of potential CD8+ T cell epitopes, e.g., the comparison of sequence homology for the potential CD8+ T cell epitopes among 81,963 SARS-CoV-2 strains (that currently circulate in 190 countries on 6 continents), the 4 major “common cold” Coronaviruses that cased previous outbreaks (e.g. hCoV-OC43, hCoV-229E, hCoV-HKU1-Genotype B, and hCoV-NL63), and the SL-CoVs that were isolated from bats, civet cats, pangolins and camels. Epitope sequences highlighted in yellow present a high degree of homology among the currently circulating 81,963 SARS-CoV-2 strains and at least a 50% conservancy among two or more humans SARS-CoV strains from previous outbreaks, and the SL-CoV strains isolated from bats, civet cats, pangolins and camels.

[0269] From the analysis, 27 CD8+ T cell epitopes were selected as being highly conserved. FIG. 11A and FIG. 11B show the docking of the conserved epitopes to the groove of HLA-A*02:01 molecules as well as the interaction scores determined by protein-peptide molecular docking analysis.

[0270] FIG. 12A, FIG. 12B, and FIG. 12C shows that CD8+ T cells specific to several highly conserved SARS-CoV-2 epitopes disclosed herein were detected in COVID-19 patients and unexposed healthy individuals. FIG. 13A, FIG. 13B, FIG. 13C, and FIG. 13D shows immunogenicity of the identified SARS-CoV-2 CD8+ T cell epitopes.

[0271] The CD8⁺ T cell target epitopes discussed above include S₂₋₁₀, S₁₂₂₀₋₁₂₂₈, S₁₀₀₀₋₁₀₀₈, S₉₅₈₋₉₆₆, E₂₀₋₂₈, ORF1ab₁₆₇₅₋₁₆₈₃, ORF1ab₂₃₆₃₋₂₃₇₁, ORF1ab₃₀₁₃₋₃₀₂₁, ORF1ab₃₁₃₃₋₃₁₉₁, ORF1ab₅₄₇₀₋₅₄₇₈, ORF1ab₆₇₄₉₋₆₇₅₇, ORF7b₂₆₋₃₄, ORF8a₇₃₋₈₁, ORF10₃₋₁₁, and ORF10₅₋₁₃. FIG. 14 shows the genome-wide location of the epitopes. Thus, in certain embodiments, the vaccine composition may comprise one or more CD8⁺ T cell epitopes selected from: S₂₋₁₀, S₁₂₂₀₋₁₂₂₈, S₁₀₀₀₋₁₀₀₈, S₉₅₈₋₉₈₆, E₂₀₋₂₈, ORF1ab₁₆₇₅₋₁₆₈₃, ORF1ab₂₃₆₃₋₂₃₇₁, ORF1ab₃₀₁₃₋₃₀₂₁, ORF1ab₃₁₈₃₋₃₁₉₁, ORF1ab₅₄₇₀₋₅₄₇₈, ORF1ab₆₇₄₉₋₆₇₅₇, ORF7b₂₆₋₃₄, ORF8a₇₃₋₈₁, ORF10₃₋₁₁, ORF10₅₋₁₃, or a combination thereof. Table 3 below describes the sequences for the aforementioned epitope regions.

TABLE 3

| | | SEQ |
|---|---|---|
| CD8⁺ T Cell | Epitope | ID |
| Epitope | Sequence | NO: |
| ORF1ab₈₄₋₉₂ | VMVELVAEL | 2 |
| ORF1ab₁₆₇₅₋₁₅₈₃ | YLATALLTL | 3 |
| ORF1ab₂₂₁₀₋₂₂₁₈ | CLEASFNYL | 4 |
| ORF1ab₂₃₈₃₋₂₃₇₁ | WLMWLIINL | 5 |
| ORF1ab₃₀₁₃₋₃₀₂₁ | SLPGVFCGV | 6 |
| ORF1ab₃₁₈₃₋₃₁₉₁ | FLLNKEMYL | 7 |
| ORF1ab₃₇₃₂₋₃₇₄₀ | SMWALIISV | 8 |
| ORF1ab₄₂₈₃₋₄₂₉₁ | YLASGGQPI | 9 |
| ORF1ab₅₄₇₀₋₅₄₇₈ | KLSYGIATV | 10 |
| ORF1ab₆₄₁₉₋₆₄₂₇ | YLDAYNMMI | 11 |
| ORF1ab_{6749-B757} | LLLDDFVEI | 12 |
| S₂₋₁₀ | FVFLVLLPL | 13 |
| S₆₉₁₋₆₉₉ | SIIAYTMSL | 14 |
| S₉₅₈₋₉₅₆ | ALNTLVKQL | 15 |
| S₉₇₆₋₉₈₄ | VLNDILSRL | 16 |
| S₁₀₀₀₋₁₀₀₈ | RLQSLQTYV | 17 |
| S₁₂₂₀₋₁₂₂₈ | FIAGLIAIV | 18 |
| E₂₀₋₂₈ | FLAFVVFLL | 19 |
| E₂₅₋₃₄ | FLLVTLAIL | 20 |
| E₂₆₋₃₄ | FLLNKEMYL | 21 |
| M₅₂₋₆₀ | IFLWLLWPV | 22 |
| M₈₉₋₉₇ | GLMWLSYFI | 23 |
| ORF6₃₋₁₁ | HLVDFQVTI | 24 |
| ORF7b₂₆₋₃₄ | IIFWFSLEL | 25 |
| ORF8a₃₁₋₃₉ | YVVDDPCPI | 26 |
| ORF8a₇₃₋₈₁ | YIDIGNYTV | 27 |
| ORF10₃₋₁₁ | YINVFAFPF | 28 |
| ORF10₅₋₁₃ | NVFAFPFTL | 29 |
| S | KSYGFQPTY | 194 |
| S | VVGNHKYRF | 195 |
| S | YQVGNKPCK | 196 |
| S | CVIAWNSKK | 137 |
| S | KGAKGLNCY | 198 |
| S | SQCVNFTTR | 199 |
| S | NIADYNYKL | 200 |
| S | YLPLKSYGF | 201 |
| S | KCYGVSLNK | 202 |
| S | IYKTPPIKY | 203 |
| S | CVADYSFLY | 204 |
| S | SVYAWDRRK | 205 |
| S | RFFRKSNLK | 206 |
| S | DiSTEIYQV | 207 |
| S | YQPHRVWVL | 208 |
| S | FVIRGDQVK | 209 |
| S | NATKFSSVY | 210 |
| S | NLCPFSEIF | 211 |
| S | KINNCVADY | 213 |

[0272] The present invention is not limited to the aforementioned CD8⁺ T cell epitopes. For example, the present invention also includes variants of the aforementioned CD8⁺ T cell epitopes, for example sequences wherein the aforementioned CD8⁺ T cell epitopes are truncated by one amino acid (examples shown below in Table 4).

TABLE 4

| CD8⁺ TCell | Sequence with | |
|---|---|---|
| Epitope | Single AA | SEQ ID |
| Origin: | Truncation | NO: |
| ORF1ab₈₄₋₉₂ | VMVELVAE | 30 |
| ORF1ab₁₆₇₅₋₁₅₈₃ | LATALLTL | 31 |
| ORFIab₂₂₁₀₋₂₂₁₈ | CLEASFNY | 32 |
| ORFIab₂₃₈₃₋₂₃₇₁ | LMWLIINL | 33 |
| ORFIab₃₀₁₃₋₃₀₂₄ | SLPGVFCG | 34 |
| ORFIab₃₁₈₃₋₃₁₉₁ | LLNKEMYL | 35 |
| ORF1ab₃₇₃₂₋₃₇₄₀ | SMWALIIS | 36 |
| ORF1ab₄₂₈₃₋₄₂₉₁ | LASGGQPI | 37 |
| ORF1ab₅₄₇₀₋₅₄₇₈ | KLSYGIAT | 38 |
| ORF1ab₆₄₁₉₋₅₄₂₇ | LDAYNMMI | 39 |
| ORF1ab₆₇₄₉₋₈₇₅₇ | LLLDDFVE | 40 |
| S₂₋₁₀ | VFLVLLPL | 41 |
| S₆₉₁₋₆₉₉ | SIIAYTMS | 42 |
| S₉₅₈₋₉₆₆ | LNTLVKQL | 43 |
| S₉₇₆₋₉₈₄ | VLNDILSR | 44 |
| S₁₀₀₀₋₁₀₀₈ | LQSLQTYV | 45 |
| S₁₂₂₀₋₁₂₂₈ | FIAGLIAI | 46 |
| E₂₀₋₂₈ | LAFVVFLL | 47 |
| E₂₈₋₃₄ | FLLVTLAL | 48 |
| E₂₈₋₃₄ | LLNKEMYL | 49 |
| M₅₂₋₆₀ | IFLWLLWP | 59 |
| M₈₉₋₉₇ | LMWLSYFI | 51 |
| ORF₆₃₋₁₁ | HLVDFQVT | 52 |
| ORF7b₂₈₋₃₄ | IFWFSLEL | 53 |
| ORF8a₃₁₋₃₉ | YVVDDPCP | 54 |
| ORF8a₇₃₋₈₁ | iDIGNYTV | 55 |
| ORF10₃₋₁₁ | YINVFAFP | 56 |
| ORF10₅₋₁₃ | VFAFPFTI | 57 |
| S | KSYGFQPT | 214 |
| S | VVGNHKYR | 215 |
| S | YQVGNKPC | 216 |
| S | CVIAWNSK | 217 |
| S | KGAKGLNC | 218 |
| S | SQCVNFTT | 219 |
| S | NIADYNYK | 220 |
| S | YLPLKSYG | 221 |
| S | KCYGVSLN | 222 |
| S | IYKTPPIK | 223 |
| S | CVADYSFL | 224 |
| S | SVYAWDRR | 225 |
| S | RFFRKSNL | 226 |
| S | DiSTEIYQ | 227 |
| S | YQPHRVVV | 228 |
| S | FVIRGDQV | 229 |
| S | NATKFSSV | 230 |
| S | NLCPFSEI | 231 |
| S | ASATVCGP | 232 |
| S | KINNCVAD | 233 |
| S | KSYGFQPT | 234 |

[0273] The present invention is not limited to the aforementioned CD8⁺ T cell epitopes.

[0274] In certain embodiments, the vaccine composition comprises 1-10 CD8⁺ T cell target epitopes. In certain embodiments, the vaccine composition comprises 2-10 CD8⁺ T cell target epitopes. In certain embodiments, the vaccine composition comprises 2-15 CD8⁺ T cell target epitopes. In certain embodiments, the vaccine composition comprises 2-20 CD8⁺ T cell target epitopes. In certain embodiments, the vaccine composition comprises 2-30 CD8⁺ T cell target epitopes. In certain embodiments, the vaccine composition comprises 2-15 CD8⁺ T cell target epitopes. In certain embodiments, the vaccine composition comprises 2-5 CD8⁺ T cell target epitopes. In certain embodiments, the vaccine composition comprises 5-10 CD8⁺ T cell target epitopes. In certain embodiments, the vaccine composition comprises 5-15 CD8⁺ T cell target epitopes. In certain embodiments, the vaccine composition comprises 5-20 CD8⁺ T cell target epitopes. In certain embodiments, the vaccine composition comprises 5-25 CD8⁺ T cell target epitopes. In certain embodiments, the vaccine composition comprises 5-30 CD8⁺ T cell target epitopes. In certain embodiments, the vaccine composition comprises 10-20 CD8⁺ T cell target epitopes. In certain embodiments, the vaccine composition comprises 10-30 CD8⁺ T cell target epitopes

### CD4+ Epitopes

[0275] Examples of methods for identifying potential CD4+ T cell epitopes and screening conservancy of potential CD4+ T cell epitopes are described herein. The present invention is not limited to the particular software systems disclosed, and other software systems are accessible to one of ordinary skill in the art for such methods. The present invention is not limited to the specific haplotypes used herein. For example, one of ordinary skill in the art may select alternative molecules (e.g., HLA molecules) for molecular docking studies,

[0276] FIG. 15 shows the identification of highly conserved potential SARS-CoV-2-derived human CD4+ T cell epitopes that bind with high affinity to HLA-DR molecules. Out of a total of 9,594 potential HLA-DR-restricted CD4+ T cell epitopes from the whole genome sequence of SARS-CoV-2-Wuhan-Hu-1 strain (MN908947.3), 16 epitopes that bind with high affinity to HLA-DRB1 molecules were selected. The conservancy of the 16 CD4+ T cell epitopes was analyzed among human and animal Coronaviruses Shown are the comparison of sequence homology for the 16 CD4+ T cell epitopes among 81,963 SARS-CoV-2 strains (that currently circulate in 6 continents), the 4 major “common cold” Coronaviruses that cased previous outbreaks (i.e. hCoV-OC43, hCoV-229E, hCoV-HKU1, and hCoV-NL63), and the SL-CoVs that were isolated from bats, civet cats, pangolins and camels. Epitope sequences highlighted in green present high degree of homology among the currently circulating 81,963 SARS-CoV-2 strains and at least a 50% conservancy among two or more humans SARS-CoV strains from previous outbreaks, and the SL-CoV strains isolated from bats, civet cats, pangolins and camels.

[0277] From the analysis, 16 CD4+ T cell epitopes were selected as being highly conserved. FIG. 16A and FIG. 16B show the docking of the conserved epitopes to the groove of HLA-A*02:01 molecules as well as the interaction scores determined by protein-peptide molecular docking analysis.

[0278] FIG. 17A, FIG. 17B, and FIG. 17C show that CD4+ T cells specific to several highly conserved SARS-CoV-2 epitopes disclosed herein were detected in COVID-19 patients and unexposed healthy individuals. FIG. 18A, FIG. 18B, FIG. 18C, and FIG. 18D show immunogenicity of the identified SARS-CoV-2 CD4+ T cell epitopes.

[0279] The CD4⁺ T cell target epitopes discussed above include ORF1a₁₃₅₀₋₁₃₆₅, ORF1ab₅₀₁₉₋₅₀₃₃, ORF6₁₂₋₂₆, ORF1ab₆₀₈₆₋₆₁₀₂, ORF1ab₆₄₂₀₋₆₄₃₄, ORF1a₁₈₀₁₋₁₈₁₅, S₁₋₁₃, E₂₆₋₄₀, E₂₀₋₃₄, M₁₇₆₋₁₉₀, N₂₈₈₋₄₀₃, ORF7a₃₋₁₇, ORF7a₁₋₁₅, ORF7b₈₋₂₂, ORF7a₉₆₋₁₁₂, and ORF8₁₋₁₅. FIG. 14 shows the genome-wide location of the epitopes. Thus, in certain embodiments, the vaccine composition may comprise one or more CD4⁺ T cell target epitopes selected from ORF1a₁₃₅₀₋₁₃₆₅, ORF1ab₅₀₁₉₋₅₀₃₃, ORF6₁₂₋₂₆, ORF1ab₆₀₈₆₋₆₁₀₂, ORF1ab₆₄₂₀₋₆₄₃₄, ORF1a₁₈₀₁₋₁₈₁₅, S₁₋₁₃, E₂₆₋₄₀, E₂₀₋₃₄, M₁₇₆₋₁₉₀, N₃₈₈₋₄₀₃, ORF7a₃₋₁₇, ORF7a₁₋₁₅, ORF7b₈₋₂₂, ORF7a₉₈₋₁₁₂, ORF8₁₋₁₅, or a combination thereof. Table 5 below describes the sequences for the aforementioned epitope regions.

TABLE 5

| CD4⁺ | | SEQ |
|---|---|---|
| T Cell | | ID |
| Epitope | Epitope Sequence | NO: |
| ORF1a₁₃₅₀₋₁₃₈₅ | KSAFYILPSIISNEK | 58 |
| ORF1a₁₈₀₁₋₁₈₁₅ | ESPFVMMSAPPAQYE | 59 |
| ORF1ab₅₀₁₉₋₅₀₃₃ | PNMLRIMASLVLARK | 60 |
| ORF1ab₆₀₈₈₋₆₁₀₂ | RIKVQMLSDTLKNL | 61 |
| ORF1ab₆₄₂₀₋₆₄₃₄ | LDAYNMMISAGFSLW | 62 |
| S₁₋₁₃ | MFVFLVLLPLVSS | 63 |
| E₂₀₋₃₄ | FLAFVVFLLVTLAIL | 64 |
| E₂₈₋₄₀ | FLLVTLAILTALRLC | 65 |
| M₁₇₅₋₁₉₀ | LSYYKLGASQRVAGD | 66 |
| ORF6ₗ₂₋₂₆ | AEILLIIMRTFKVSI | 67 |
| ORF7a₁₋₁₅ | MKIILFLALITLATC | 68 |
| ORF7a₃₋₁₇ | IIFLALITLATCEL | 69 |
| ORF7a₉₆₋₁₁₂ | SPIFLIVAAIVFITL | 70 |
| ORF7b₈₋₂₂ | DFYLCFLAFLLFLVL | 71 |
| ORFBb₁₋₁₅ | MKFLVFLGIITTVAA | 72 |
| N₃₈₈₋₄₀₃₁ | KQQTVTLLPAADLDDF | 73 |
| S | LCPFSEIFNATKFSS | 235 |
| S | NCYLPLKSYGFQPTY | 236 |
| S | GNHKYRFRFFRKSNL | 237 |
| S | PFERDISTEIYQVGN | 238 |
| S | KKLDSKVVGNHKYRF | 239 |
| S | KGLNCYLPLKSYGFQ | 240 |
| S | LVLLPLVSSQCVNFT | 241 |
| S | RGDQVKQIAPGQTGN | 242 |
| S | SASFSTFKCYGVSLN | 243 |
| S | KLDSKVVGNHKYRFR | 244 |
| S | FAQVKQIYKTPPIKY | 245 |
| S | ADYSFLYNSASFSTF | 246 |
| S | ATKFSSVYAWDRRKI | 247 |
| S | PHRVVVLSFELLHAS | 248 |
| S | FERDISTEIYQVGNK | 249 |
| S | AKGLNCYLPLKSYGF | 250 |
| S | SIVRFPNITNLCPFS | 251 |
| S | NNCVADYSFLYNSAS | 252 |
| S | KGAKGLNCYLPLKSY | 253 |

[0280] The present invention is not limited to the aforementioned CD4⁺ T cell epitopes. For example, the present invention also includes variants of the aforementioned CD4⁺ T cell epitopes, for example sequences wherein the aforementioned CD42 T cell epitopes are truncated by one or more amino acids or extended by one or more amino acids (examples shown below in Table 6).

TABLE 6

| CD4⁺ T Cell | Sequence | SEQ |
|---|---|---|
| Epitope | with Single | ID |
| Origin | AA Truncation | NO: |
| ORF1a₁₃₅₀₋₁₃₈₅ | KSAFYILPSIISNE | 74 |
| ORF1a₁₈₀₁₋₁₈₁₅ | ESPFVMMSAPPAQY | 75 |
| ORF1ab₅₀₁₉₋₅₀₃₃ | PNMLRIMASLVLAR | 76 |
| ORF1ab₆₀₈₈₋₈₁₀₂ | RIKVQMLSDTLKN | 77 |
| ORF1ab₆₄₂₀₋₈₄₃₄ | LDAYNMMISAGFSL | 78 |
| S₁₋₁₃ | MFVFLVLLPLVS | 79 |
| E₂₀₋₃₄ | FLAFVVFLLVTLAL | 80 |
| E₂₈₋₄₀ | FLLVTLAILTALRL | 81 |
| M₁₇₅₋₁₉₀ | LSYYKLGASQRVAG | 82 |
| ORF6₁₂₋₂₆ | AEILLIIMRTFKVS | 83 |
| ORF7a₁₋₁₅ | MKIILFLALITLAT | 84 |
| ORF7a₃₋₁₇ | IFLALITLATCE | 85 |
| ORF7a₉₈₋₁₁₂ | SPIFLIVAAIVFIT | 86 |
| ORF7b₈-₂₂ | DFYLCFLAFLLFLV | 87 |
| ORF8b₁₋₁₅ | MKFLVFLGIITTVA | 88 |
| N₃₈₈₋₄₀₃₁ | KQQTVTLLPAADLDD | 89 |
| ORF1a₁₂₅₀₋₁₃₈₅ | SAFYILPSIISNEK | 90 |
| ORF1a₁₈₀₁₋₁₈₁₅ | SPFVMMSAPPAQYE | 91 |
| ORF1ab₅₀₁₉₋₅₀₃₃ | NMLRIMASLVLARK | 92 |
| ORF1ab₆₀₈₈₋₆₁₀₂ | IKVQMLSDTLKNL | 93 |
| ORF1ab₆₄₂₀₋₆₄₃₄ | DAYNMMISAGFSLW | 94 |
| S₁₋₁₃ | FVFLVLLPLVSS | 95 |
| E₂₀₋₃₄ | LAFVVFLLVTLAIL | 96 |
| E₂₈₋₄₀ | LLVTLAILTALRLC | 97 |
| M₁₇₆₋₁₉₀ | SYYKLGASQRVAGD | 98 |
| ORF6₁₂₋₂₆ | EILLI IMRTFKVSI | 99 |
| ORF7a₁₋₁₅ | KIILFLALITLATC | 100 |
| ORF7a₃₋₁₇ | IFLALITLATCEL | 101 |
| ORF7a₉₈₋₁₁₂ | PIFLIVAAIVFITL | 102 |
| ORF7b₈₋₂₂ | FYLCFLAFLLFLVL | 103 |
| ORF8b1-15 | KFLVFLGIITTVAA | 104 |
| N₃₈₈₋₄₀₃₁ | QQTVTLLPAADLDDF | 105 |
| S | LCPFSEIFNATKFS | 254 |
| S | NCYLPLKSYGFQPT | 255 |
| S | GNHKYRFRFFRKSN | 256 |
| S | PFERDISTEIYQVG | 257 |
| S | KKLDSKVVGNHKYR | 258 |
| S | KGLNCYLPLKSYGF | 259 |
| S | LVLLPLVSSQCVNF | 260 |
| S | RGDQVKQIAPGQTG | 261 |
| S | SASFSTFKCYGVSL | 262 |
| S | KLDSKWGNHKYRF | 263 |
| S | FAQVKQIYKTPPIK | 264 |
| S | ADYSFLYNSASFST | 265 |
| S | ATKFSSVYAWDRRK | 266 |
| S | PHRVVVLSFELLHA | 267 |
| S | FERDISTEIYQVGN | 268 |
| S | AKGLNCYLPLKSYG | 269 |
| S | SIVRFPNITNLCPF | 270 |
| S | NNCVADYSFLYNSA | 271 |
| S | KGAKGLNCYLPLKS | 272 |

[0281] The present invention is not limited to the aforementioned CD4⁺ T cell epitopes.

[0282] In certain embodiments, the vaccine composition comprises 1-10 CD4⁺ T cell target epitopes. In certain embodiments, the vaccine composition comprises 2-10 CD4⁺ T cell target epitopes. In certain embodiments, the vaccine composition comprises 2-15 CD4⁺ T cell target epitopes. In certain embodiments, the vaccine composition comprises 2-20 CD4⁺ T cell target epitopes. In certain embodiments, the vaccine composition comprises 2-30 CD4⁺ T cell target epitopes. In certain embodiments, the vaccine composition comprises 2-15 CD4⁺ T cell target epitopes. In certain embodiments, the vaccine composition comprises 2-5 CD4⁺ T cell target epitopes. In certain embodiments, the vaccine; composition comprises 5-10 CD4⁺ T cell target epitopes. In certain embodiments, the vaccine composition comprises 5-15 CD4+ T cell target epitopes. In certain embodiments, the vaccine composition comprises 5-20 CD4⁺ T cell target epitopes. In certain embodiments, the vaccine composition comprises 5-25 CD4⁺ T cell target epitopes. In certain embodiments, the vaccine composition comprises 5-30 CD4⁺ T cell target epitopes. In certain embodiments, the vaccine composition comprises 10-20 CD4⁺ T cell target epitopes. In certain embodiments, the vaccine composition comprises 10-30 CD4⁺ T cell target epitopes.

### B Cell Epitopes

[0283] Examples of methods for identifying potential B cell epitopes and screening conservancy of potential B cell epitopes are described herein. The present invention is not limited to the particular software systems disclosed, and other software systems are accessible to one of ordinary skill in the art for such methods.

[0284] FIG. 19 shows the conservation of Spike-derived B cell epitopes among human, bat, civet cat, pangolin, and camel coronavirus strains. Multiple sequence alignment performed using ClustalW among 29 strains of SARS coronavirus (SARS-CoV) obtained from human, bat, civet, pangolin, and camel. This includes 7 human SARS/MERS-CoV strains (SARS-CoV-2-Wuhan (MN908947.3), SARS-HCoV-Urbani (AY278741.1), CoV-HKU1-Genotype-B (AY884001), CoV-OC43 (KF923903), CoV-NL63 (NC005831), CoV-229E (KY983587), MERS (NC019843)); 8 bat SARS-CoV strains (BAT-SL-CoV-WIV16 (KT444582), BAT-SL-CoV-WIV1 (KF367457.1), BAT-SL-CoV-YNLF31C (KP886808.1), BAT-SARS-CoV-RS672 (FJ588686.1), BAT-CoV-RATG13 (MN996532.1), BAT-CoV-YN01 (EPIISL412976), BAT-CoV-YNO2 (EPIISL412977), BAT-CoV-19-ZXC21 (MG772934.1); 3 Civet SARS-CoV strains (SARS-CoV-Civet007 (AY572034.1), SARS-CoV-A022 (AY686863.1), SARS-CoV-B039 (AY686864.1)); 9 pangolin SARS-CoV strains (PCoV-GX-P2V (MT072864.1), PCoV-GX-P5E (MT040336.1), PCoV-GX-P5L (MT040335.1), PCoV-GX-P1E (MT040334.1), PCoV-GX-P4L (MT040333.1), PCoV-MP789 (MT084071.1), PCoV-GX-P3B (MT072865.1), PCoV-Guangdong-P2S (EPIISL410544), PCoV-Guangdong (EPIISL410721)); 4 camel SARS-CoV strains (Camel-CoV-HKU23 (KT368891.1), DcCoV-HKU23 (MN514967.1), MERS-CoV-Jeddah (KF917527.1), Riyadh/RY141 (NC028752.1)) and 1 recombinant strain (FJ211859.1)). Regions highlighted with blue color represent the sequence homology. The B cell epitopes, which showed at least 50% conservancy among two or more strains of the SARS Coronavirus or possess receptor-binding domain (RBD) specific amino acids were selected as candidate epitopes.

[0285] From the analysis, 22 B cell epitopes were selected as being highly conserved. FIG. 20A and FIG. 20B shows the docking of the conserved epitopes to the ACE2 receptor as well as the interaction scores determined by protein-peptide molecular docking analysis. FIG. 21A, FIG. 21B, FIG. 21C, FIG. 21D, FIG. 21E, FIG. 21F, and FIG. 21G shows immunogenicity of the identified SARS-CoV-2 B cell epitopes.

[0286] The B cell target epitopes discussed above include S₂₈₇₋₃₁₇, S₅₂₄₋₅₉₈, S₆₀₁₋₆₄₀, S₈₀₂₋₈₁₉, S₈₈₈₋₉₀₉, S₃₆₉₋₃₉₃, S₄₄₀₋₅₀₁, S₁₁₃₃₋₁₁₇₂, S₃₂₉₋₃₆₃, S₅₉₋₈₁, and S₁₃₋₃₇. FIG. 28 shows the genome-wide location of the epitopes. Thus, in certain embodiments, the vaccine composition may comprise one or more B cell target epitopes selected from: S₂₃₇₋₃₁₇, S₅₂₄₋₅₉₈, S₆₀₁₋₆₄₀, S₈₀₂₋₈₁₉, S₈₈₈₋₉₀₉, S₃₅₉₋₃₉₃, S₄₄₀₋₅₀₁, S₁₁₃₃₋₁₁₇₂, S₃₂₉₋₃₆₃, S₅₉₋₈₁, and S₁₃₋₃₇. In some embodiments; the B cell epitope is whole spike protein. In some embodiments, the B cell epitope is a portion of the spike protein. Table 7 below describes the sequences for the aforementioned epitope regions.

TABLE 7

| | | SEQ |
|---|---|---|
| B Cell | | ID |
| Epitope | Epitope Sequence | NO: |
| S₁₃₋₃₇ | SQCVNLTTRTQLPPAYTNSFT | 106 |
| | RGVY | |
| S₅₉₋₈₁ | FSNVTWFHAIHVSGTNGTKRF | 107 |
| | DN | |
| S₂₈₇₋₃₁₇ | DAVDCALDPLSETKCTLKSFT | 108 |
| | VEKGIYQTSN | |
| S₆₀₁₋₆₄₀ | GTNTSNQVAVLYODVNCTEV | 109 |
| | PVAIHADQLTPTWRVYSTGS | |
| S₅₂₄₋₅₉₈ | VCGPKKSTNLVKNKCVNFNFN | 110 |
| | GLTGTGVLTESNKKFLPFQQF | |
| | GRDIADTTDAVRDPQTLEILDI | |
| | TPCSFGGVSVI | |
| S₄₄₀₋₅₀₁ | NLDSKVGGNYNYLYRLFRKSN | 111 |
| | LKPFERDISTEIYQAGSTPCNG | |
| | VEGFNCYFPLQSYGFQPTE | |
| S₃₆₉₋₃₉₃ | YNSASFSTFKCYGVSPTKLND | 112 |
| | LCFT | |
| S₃₂₉₋₃₆₃ | FPNITNLCPFGEVFNATRFASV | 113 |
| | YAWNRKRISNCVA | |
| S₁₁₃₃₋₁₁₇₂ | VNNTVYDPLQPELDSFKEELD | 114 |
| | KYFKNHTSPDVDLGDISGI | |
| S₈₀₂₋₈₁₉ | FSQILPDPSKPSKRSFIE | 115 |
| S₈₈₈₋₉₀₉ | FGAGAALQIPFAMQMAYRFN | 116 |
| | GI | |
| S | CVNFTTRTQLPPAYTNSFT | 273 |
| | RGVYY | |
| S | NITNLCPFSEIFNATKFSSV | 274 |
| | YAWDRR | |
| S | INNCVADYSFLYNSASFST | |
| | FKCYGVSLNKLNDL | |
| S | RGDQVKQIAPGQTGNIAD | 276 |
| S | KKLDSKWGNHKYRFRFFR | 277 |
| | KSNLKPFERDISTEISTEIY | |
| | QVGNKPCKG | |
| S | TYGVGY | 278 |
| S | LHASATVCGPKKSTNL | 279 |
| S | VKQIYKTPPIKYFGGFNFS | 280 |
| | QILPDPSKPSK | |

[0287] The present invention is not limited to the aforementioned B cell epitopes. For example, the present invention also includes variants of the aforementioned B cell epitopes, for example sequences wherein the aforementioned B cell epitopes are truncated by one or more amino acids or extended by one or more amino acids (examples shown below in Table 8).

TABLE 8

| Origin | | SEQ |
|---|---|---|
| of | Sequence with AA | ID |
| Epitope | Truncation | NO: |
| S₁₃₋₃₇ | SQCVNLTTRTQLPPAYTNSFT | 117 |
| | RG | |
| S₅₉₋₇₉ | FSNVTWFHAIHVSGTNGTKRF | 118 |
| S₂₈₇₋₃₁₅ | DAVDCALDPLSETKCTLKSFT | 119 |
| | VEKGIYQT | |
| S₆₀₁₋₅₃₈ | GTNTSNQVAVLYQDVNCTEV | 120 |
| | PVAIHADQLTPTWRVYST | |
| S₅₂₄₋₅₉₆ | VCGPKKSTNLVKNKCVNFNFN | 121 |
| | GLTGTGVLTESNKKFLPFQQF | |
| | GRDIADTTDAVRDPQTLEILDI | |
| | TPCSFGGVS | |
| S₄₄₀₋₄₉₉ | NLDSKVGGNYNYLYRLFRKSN | 122 |
| | LKPFERDISTEIYQAGSTPCNG | |
| | VEGFNCYFPLQSYGFQP | |
| S₃₆₉₋₃₉₁ | YNSASFSTFKCYGVSPTKLND | 123 |
| | LC | |
| S₃₂₉₋₃₆₁ | FPNITNLCPFGEVFNATRFASV | 124 |
| | YAWNRKRISNC | |
| S₁₁₃₃₋₁₁₇₀ | VNNTVYDPLQPELDSFKEELD | 125 |
| | KYFKNHTSPDVDLGDIS | |
| S₈₀₂₋₈₁₇ | FSQILPDPSKPSKRSF | 126 |
| S₈₈₈₋₉₀₇ | FGAGAALQIPFAMOMAYRFN | 127 |
| S₁₃₋₃₇ | CVNLTTRTQLPPAYTNSFT | 128 |
| | RGVY | |
| S₆₁₋₈₁ | NVTWFHAIHVSGTNGTKR | 129 |
| | FDN | |
| S₂₈₇₋₃₁₇ | VDCALDPLSETKCTLKSFT | 130 |
| | VEKGIYQTSN | |
| S₆₀₁₋₆₄₀ | NTSNQVAVLYQDVNCTEV | 131 |
| | PVAIHADQLTPTWRVYSTG | |
| | S | |
| S₅₂₄₋₅₉₈ | GPKKSTNLVKNKCVNFNF | 132 |
| | NGLTGTGVLTESNKKFLPF | |
| | QQFGRDIADTTDAVRDPQ | |
| | TLEILDITPCSFGGVSVI | |
| S₄₄₀₋₅₀₁ | DSKVGGNYNYLYRLFRKS | 133 |
| | NLKPFERDISTEIYQAGSTP | |
| | CNGVEGFNCYFPLQSYGF | |
| | QPTE | |
| S₃₇₁₋₃₉₃ | SASFSTFKCYGVSPTKLND | 134 |
| | LCFT | |
| S₃₃₁₋₃₈₃ | NITNLCPFGEVFNATRFAS | 135 |
| | VYAWNRKRISNCVA | |
| S₁₁₃₅₋₁₁₇₂ | NTVYDPLQPELDSFKEELD | 136 |
| | KYFKNHTSPDVDLGDISGI | |
| S₈₀₄₋₈₁₉ | QILPDPSKPSKRSFIE | 137 |
| S₈₉₀₋₉₀₉ | AGAALQIPFAMQMAYRFN | 138 |
| | GI | |
| S | CVNFTTRTQLPPAYTNSFTRG | 281 |
| | V | |
| S | NITNLCPFSEIFNATKFSSVYA | 282 |
| | WD | |
| S | INNCVADYSFLYNSASFSTFK | 283 |
| | CYGVSLNKLN | |
| S | RGDQVKQIAPGQTGNI | 284 |
| S | KKLDSKWGNHKYRFRFFRKS | 285 |
| | NLKPFERDISTEISTEIYQVGN | |
| | KPC | |
| S | LHASATVCGPKKST | 286 |
| S | VKQIYKTPPIKYFGGFNFSQIL | 287 |
| | PDPSKP | |
| S | NFTTRTQLPPAYTNSFTRG | 288 |
| | VYY | |
| S | TNLCPFSEIFNATKFSSVYA | 289 |
| | WDRR | |
| S | NCVADYSFLYNSASFSTFK | 290 |
| | CYGVSLNKLNDL | |
| S | DQVKQIAPGQTGNIAD | 291 |
| S | LDSKWGNHKYRFRFFRKS | 292 |
| | NLKPFERDISTEISTEIYQV | |
| | GNKPCKG | |
| S | ASATVCGPKKSTNL | 293 |
| S | QIYKTPPIKYFGGFNFSQIL | 294 |
| | PDPSKPSK | |

[0288] As previously discussed, in some embodiments, the B cell epitope is in the form of whole spike protein. In some embodiments, the B cell epitope is in the form of a portion of spike protein. In some embodiments, the transmembrane anchor of the spike protein has an intact S1-S2 cleavage site. In some embodiments, the spike protein is in its stabilized conformation. In some embodiments, the spike protein is stabilized with proline substitutions at amino acid positions 986 and 987 at the top of the central helix in the S2 subunit. In some embodiments, the composition comprises a trimerized SARS-CoV-2 receptor-binding domain (RBD). In some embodiments, the trimerized SARS-CoV-2 receptor-binding domain (RBD) sequence is modified by the addition of a T4 fibritin-derived foldon trimerization domain. In some embodiments, the addition of a T4 fibritin-derived foldon trimerization domain increases immunogenicity by multivalent display. FIG. 22 shows a non-limiting example of a spike protein comprising one or more mutations.

[0289] In some embodiments, the spike protein comprises Tyr-489 and Asn-487 (e.g., Tyr-489 and Asn-487 help with interaction with Tyr 83 and Gln-24 on ACE-2). In some embodiments, the spike protein comprises Gln-493 (e.g., Gln-493 helps with interaction with Glu-35 and Lys-31 on ACE-2). In some embodiments, the spike protein comprises Tyr-505 (e.g., Tyr-505 helps with interaction with Glu-37 and Arg-393 on ACE-2). In some embodiments, the composition comprises a mutation 682-PRAR-685→682-QQAQ-685 in the S1-S2 cleavage site.

[0290] In some embodiments, the composition comprises at least one proline substitution. In some embodiments, the composition comprises at least two proline substitutions. For example, the proline substitution may be at position K986 and V987.

[0291] In certain embodiments, the vaccine composition comprises 1-10 B cell target epitopes. In certain embodiments, the vaccine composition comprises 2-10 B cell target epitopes. In certain embodiments, the vaccine composition comprises 2-15 B cell target epitopes. In certain embodiments, the vaccine composition comprises 2-20 B cell target epitopes. In certain embodiments, the vaccine composition comprises 2-30 B cell target epitopes. In certain embodiments, the vaccine composition comprises 2-15 B cell target epitopes. In certain embodiments, the vaccine composition comprises 2-5 B cell target epitopes. In certain embodiments, the vaccine composition comprises 5-10 B cell target epitopes. In certain embodiments, the vaccine composition comprises 5-15 B cell target epitopes. In certain embodiments, the vaccine composition comprises 5-20 B cell target epitopes. In certain embodiments, the vaccine composition comprises 5-25 B cell target epitopes. In certain embodiments, the vaccine composition comprises 5-30 B cell target epitopes. In certain embodiments, the vaccine composition comprises 10-20 B cell target epitopes. In certain embodiments, the vaccine composition comprises 10-30 B cell target epitopes.

[0292] For certain embodiments, the epitopes that are selected may be those that achieve a particular score in a binding assay (for binding to an HLA molecule, for example.) For example, in some embodiments, the epitopes selected have an IC₅₀ score of 250 or less in an ELISA binding assay (e.g., an ELISA binding assay specific for HLA-DR/peptide combination, HLA-A*0201/peptide combination, etc.), or the equivalent of the IC₅₀ score of 250 or less in a different binding assay. Binding assays are well known to one of ordinary skill in the art.

### Large Sequence(s) Arrangements

[0293] The large sequences of the compositions described may be arranged in various configurations (see FIG. 23). In some embodiments, the large sequences may be arranged such that a spike glycoprotein (S) or a portion thereof (e.g., the RBD) is followed by an ORF1a/b protein or a portion thereof followed by Nucleoprotein or a portion thereof. In some embodiments, the large sequences may be arranged such that a spike glycoprotein (S) or a portion thereof (e.g., the RBD) is followed by an ORF1a/b protein or a portion thereof followed by Nucleoprotein, or a portion thereof is followed by a membrane (M) or a portion thereof.

[0294] In some embodiments, the large sequences may be arranged such that an ORF1a/b protein or a portion thereof followed by a nucleoprotein (N) or a portion thereof. In some embodiments, the large sequences may be arranged such that an ORF1a/b protein or a portion thereof followed by nucleoprotein (N), or a portion thereof is followed by a membrane (M) or a portion thereof.

[0295] In some embodiments, the large sequences may be arranged such that a spike glycoprotein (S) or a portion thereof (e.g., the RBD) is followed by fragment 1 or a portion thereof. In some embodiments, the large sequences may be arranged such that a spike glycoprotein (S) or a portion thereof (e.g., the RBD) is followed by fragment 2 or a portion thereof. In some embodiments, the large sequences may be arranged such that a spike glycoprotein (S) or a portion thereof (e.g., the RBD) is followed by fragment 4 or a portion thereof. In some embodiments, the large sequences may be arranged such that a spike glycoprotein (S) or a portion thereof (e.g., the RBD) is followed by fragment 5 or a portion thereof. In further embodiments, the large sequences may be arranged such that a spike glycoprotein (S) or a portion thereof (e.g., the RBD) is followed by fragment 1 or a portion thereof, followed by fragment 5 or a portion thereof.

[0296] In some embodiments, the large sequences may be arranged such that a spike glycoprotein (S) or a portion thereof (e.g., the RBD) is followed by a nucleocapsid protein or a portion thereof. In some embodiments, the large sequences may be arranged such that a spike glycoprotein (S) or a portion thereof (e.g., the RBD) is followed by a ORF1ab protein or portion thereof, followed by a ORF3 protein or portion thereof followed by an Envelope protein or protein thereof, followed by Membrane protein or portion thereof followed by an ORF6 protein or portion thereof, followed by a ORF7a protein or portion thereof. In some embodiments, the large sequences may be arranged such that a spike glycoprotein (3) or a portion thereof (e.g., the RBD) is followed by a membrane protein or portion thereof, followed by an envelope protein or portion thereof, followed by a Nsp3 protein or portion thereof, followed by a Nsp5 protein or portion thereof, followed by a Nsp12 protein or portion thereof.

[0297] In some embodiments, the large sequences may be arranged such that a spike glycoprotein (S) or a portion thereof (e.g., the RBD) is followed by one large sequence. In some embodiments, the large sequences may be arranged such that a spike glycoprotein (3) or a portion thereof (e.g., the RBD) is followed by two large sequences. In some embodiments, the large sequences may be arranged such that a spike glycoprotein (S) or a portion thereof (e.g., the RBD) is followed by three large sequences. In some embodiments, the large sequences may be arranged such that a spike glycoprotein (5) or a portion thereof (e.g., the RBD) is followed by four large sequences. In some embodiments, the large sequences may be arranged such that a spike glycoprotein (S) or a portion thereof (e.g., the RBD) is followed by five large sequences.

[0298] In some embodiments, the large sequences may be arranged such that a spike glycoprotein (S) or a portion thereof (e.g., the RBD) is followed by one large sequence both are driven each by a promoter or both are driven by a single promoter but separated by a linker as illustrated in FIG x, y and z)

### Vaccine Candidates

[0299] As previously discussed, the present invention provides vaccine compositions comprising an antigen featuring: one or more large sequences, two or more large sequences, three or more large sequences, four or more large sequences, or five or more large sequences. In some embodiment, the large sequences comprise at least one B cell epitope and at least one CD4+ T cell epitope, at least one B cell epitope and at least one CD3+ T cell epitope, at least one CD4+ T cell epitope and at least one CD8+ T cell epitope, or at least one B cell epitope, at least one CD4+ T cell epitope, and at least one CD8+ T cell epitope.

[0300] Table 9 and FIG. 24 and FIG. 28 shows examples of vaccine compositions described herein. The present invention is not limited to the examples in Table 9. Per SME TRE with Cl.

TABLE 9

| Vaccine | | SEQ |
|---|---|---|
| Candidate | Sequence: | ID NO: |
| [chemical structure] | CTCGACATTGATTATTGACTAGTTATTAATAGTAATCAATTACGGGGTCA TTAGTTCATAGCCCATATATGGAGTTCCGCGTTACATAACTTACGGTAAA TGGCCCGCCTGGCTGACCGCCCAACGACCCCCGCCCATTGACGTCAAT AATGACGTATGTTCCCATAGTAACGCCAATAGGGACTTTCCATTGACGT CAATGGGTGGAGTATTTACGGTAAACTGCCCACTTGGCAGTACATCAAG TGTATCATATGCCAAGTACGCCCCCTATTGACGTCAATGACGGTAAATG GCCCGCCTGGCATTATGCCCAGTACATGACCTTATGGGACTTTCCTACT TGGCAGTACATCTACGTATTAGTCATCGCTATTACCATGGTCGAGGTGA GCCCCACGTTCTGCTTCACTCTCCCCATCTCCCCCCCCTCCCCACCCC CAATTTTGTATTTATTTATTTTTTAATTATTTTGTGCAGCGATGGGGGCG GGGGGGGGGGGGGGGCGCGCGCCAGGCGGGGCGGGGCGGGGCGA GGGGCGGGGCGGGGCGAGGCGGAGAGGTGCGGCGGCAGCCAATCA GAGCGGCGCGCTCCGAAAGTTTCCTTTTATGGCGAGGCGGCGGCGGC GGCGGCCCTATAAAAAGCGAAGCGCGCGGCGGGCGGGAGTCGCTGC GCGCTGCCTTCGCCCCGTGCCCCGCTCCGCCGCCGCCTCGCGCCGCC CGCCCCGGCTCTGACTGACCGCGTTACTCCCACAGGTGAGCGGGCGG GACGGCCCTTCTCCTCCGGGCTGTAATTAGCGCTTGGTTTAATGACGG CTTGTTTCTTTTCTGTGGCTGCGTGAAAGCCTTGAGGGGCTCCGGGAG GGCCCTTTGTGCGGGGGGAGCGGCTCGGGGGGTGCGTGCGTGTGTG TGTGCGTGGGGAGCGCCGCGTGCGGCTCCGCGCTGCCCGGCGGCTG TGAGCGCTGCGGGCGCGGCGCGGGGCTTTGTGCGCTCCGCAGTGTGC GCGAGGGGAGCGCGGCCGGGGGCGGTGCCCCGCGGTGCGGGGGGG | 139 |
| | GCTGCGAGGGGAACAAAGGCTGCGTGCGGGGTGTGTGCGTGGGGGG | |
| | GTGAGCAGGGGGTGTGGGCGCGTCGGTCGGGCTGCAACCCCCCCTG | |
| | CACCCCCCTCCCCGAGTTGCTGAGCACGGCCCGGCTTCGGGTGCGGG | |
| | GCTCCGTACGGGGCGTGGCGCGGGGCTCGCCGTGCCGGGCGGGGGG | |
| | TGGCGGCAGGTGGGGGTGCCGGGCGGGGCGGGGCCGCCTCGGGCC | |
| | GGGGAGGGCTCGGGGGAGGGGCGCGGCGGCCCCCGGAGCGCCGGC | |
| | GGCTGTCGAGGCGCGGCGAGCCGCAGCCATTGCCTTTTATGGTAATCG | |
| | TGCGAGAGGGCGCAGGGACTTCCTTTGTCCCAAATCTGTGCGGAGCCG | |
| | AAATCTGGGAGGCGCCGCCGCACCCCCTCTAGCGGGCGCGGGGCGAA | |
| | GCGGTGCGGCGCCGGCAGGAAGGAAATGGGCGGGGAGGGCCTTCGT | |
| | GCGTCGCCGCGCCGCCGTCCCCTTCTCCCTCTCCAGCCTCGGGGCTG | |
| | TCCGCGGGGGGACGGCTGCCTTCGGGGGGGACGGGGCAGGGCGGG | |
| | GTTCGGCTTCTGGCGTGTGACCGGCGGCTCTAGAGCCTCTGCTAACCA | |
| | TGTTCATGCCTTCTTCTTTTTCCTACAGCTCCTGGGCAACGTGCTGGTT | |
| | ATTGTGCTGTCTCATCATTTTGGCAAAGAATTGGAGAATAAACTAGTATT | |
| | CTTCTGGTCCCCACAGACTCAGAGAGAACCCGCCACCATGTTCGTGTT | |
| | CCTGGTGCTGCTGCCCCTGGTGAGCAGCCAGTGCGTGAACCTGACCA | |
| | CCAGGACCCAGCTGCCCCCCGCCTACACCAACAGCTTCACCAGGGGC | |
| | GTGTACTACCCCGACAAGGTGTTCAGGAGCAGCGTGCTGCACAGCACC | |
| | CAGGACCTGTTCCTGCCCTTCTTCAGCAACGTGACCTGGTTCCACGCC | |
| | ATCCACGTGAGCGGCACCAACGGCACCAAGAGGTTCGACAACCCCGT | |
| | GCTGCCCTTCAACGACGGCGTGTACTTCGCCAGCACCGAGAAGAGCAA | |
| | CATCATCAGGGGCTGGATCTTCGGCACCACCCTGGACAGCAAGACCCA | |
| | GAGCCTGCTGATCGTGAACAACGCCACCAACGTGGTGATCAAGGTGTG | |
| | CGAGTTCCAGTTCTGCAACGACCCCTTCCTGGGCGTGTACTACCACAA | |
| | GAACAACAAGAGCTGGATGGAGAGCGAGTTCAGGGTGTACAGCAGCG | |
| | CCAACAACTGCACCTTCGAGTACGTGAGCCAGCCCTTCCTGATGGACC | |
| | TGGAGGGCAAGCAGGGCAACTTCAAGAACCTGAGGGAGTTCGTGTTCA | |
| | AGAACATCGACGGCTACTTCAAGATCTACAGCAAGCACACCCCCATCAA | |
| | CCTGGTGAGGGACCTGCCCCAGGGCTTCAGCGCCCTGGAGCCCCTGG | |
| | TGGACCTGCCCATCGGCATCAACATCACCAGGTTCCAGACCCTGCTGG | |
| | CCCTGCACAGGAGCTACCTGACCCCCGGCGACAGCAGCAGCGGCTGG | |
| | ACCGCCGGCGCCGCCGCCTACTACGTGGGCTACCTGCAGCCCAGGAC | |
| | CTTCCTGCTGAAGTACAACGAGAACGGCACCATCACCGACGCCGTGGA | |
| | CTGCGCCCTGGACCCCCTGAGCGAGACCAAGTGCACCCTGAAGAGCTT | |
| | CACCGTGGAGAAGGGCATCTACCAGACCAGCAACTTCAGGGTGCAGCC | |
| | CACCGAGAGCATCGTGAGGTTCCCCAACATCACCAACCTGTGCCCCTT | |
| | CGGCGAGGTGTTCAACGCCACCAGGTTCGCCAGCGTGTACGCCTGGA | |
| | ACAGGAAGAGGATCAGCAACTGCGTGGCCGACTACAGCGTGCTGTACA | |
| | ACAGCGCCAGCTTCAGCACCTTCAAGTGCTACGGCGTGAGCCCCACCA | |
| | AGCTGAACGACCTGTGCTTCACCAACGTGTACGCCGACAGCTTCGTGA | |
| | TCAGGGGCGACGAGGTGAGGCAGATCGCCCCCGGCCAGACCGGCAA | |
| | GATCGCCGACTACAACTACAAGCTGCCCGACGACTTCACCGGCTGCGT | |
| | GATCGCCTGGAACAGCAACAACCTGGACAGCAAGGTGGGCGGCAACT | |
| | ACAACTACCTGTACAGGCTGTTCAGGAAGAGCAACCTGAAGCCCTTCG | |
| | AGAGGGACATCAGCACCGAGATCTACCAGGCCGGCAGCACCCCCTGC | |
| | AACGGCGTGGAGGGCTTCAACTGCTACTTCCCCCTGCAGAGCTACGGC | |
| | TTCCAGCCCACCAACGGCGTGGGCTACCAGCCCTACAGGGTGGTGGT | |
| | GCTGAGCTTCGAGCTGCTGCACGCCCCCGCCACCGTGTGCGGCCCCA | |
| | AGAAGAGCACCAACCTGGTGAAGAACAAGTGCGTGAACTTCAACTTCAA | |
| | CGGCCTGACCGGCACCGGCGTGCTGACCGAGAGCAACAAGAAGTTCC | |
| | TGCCCTTCCAGCAGTTCGGCAGGGACATCGCCGACACCACCGACGCC | |
| | GTGAGGGACCCCCAGACCCTGGAGATCCTGGACATCACCCCCTGCAG | |
| | CTTCGGCGGCGTGAGCGTGATCACCCCCGGCACCAACACCAGCAACC | |
| | AGGTGGCCGTGCTGTACCAGGACGTGAACTGCACCGAGGTGCCCGTG | |
| | GCCATCCACGCCGACCAGCTGACCCCCACCTGGAGGGTGTACAGCAC | |
| | CGGCAGCAACGTGTTCCAGACCAGGGCCGGCTGCCTGATCGGCGCCG | |
| | AGCACGTGAACAACAGCTACGAGTGCGACATCCCCATCGGCGCCGGC | |
| | ATCTGCGCCAGCTACCAGACCCAGACCAACAGCCCCGGCAGCGCCAG | |
| | CAGCGTGGCCAGCCAGAGCATCATCGCCTACACCATGAGCCTGGGCG | |
| | CCGAGAACAGCGTGGCCTACAGCAACAACAGCATCGCCATCCCCACCA | |
| | ACTTCACCATCAGCGTGACCACCGAGATCCTGCCCGTGAGCATGACCA | |
| | AGACCAGCGTGGACTGCACCATGTACATCTGCGGCGACAGCACCGAGT | |
| | GCAGCAACCTGCTGCTGCAGTACGGCAGCTTCTGCACCCAGCTGAACA | |
| | GGGCCCTGACCGGCATCGCCGTGGAGCAGGACAAGAACACCCAGGAG | |
| | GTGTTCGCCCAGGTGAAGCAGATCTACAAGACCCCCCCCATCAAGGAC | |
| | TTCGGCGGCTTCAACTTCAGCCAGATCCTGCCCGACCCCAGCAAGCCC | |
| | AGCAAGAGGAGCCCCATCGAGGACCTGCTGTTCAACAAGGTGACCCTG | |
| | GCCGACGCCGGCTTCATCAAGCAGTACGGCGACTGCCTGGGCGACAT | |
| | CGCCGCCAGGGACCTGATCTGCGCCCAGAAGTTCAACGGCCTGACCG | |
| | TGCTGCCCCCCCTGCTGACCGACGAGATGATCGCCCAGTACACCAGCG | |
| | CCCTGCTGGCCGGCACCATCACCAGCGGCTGGACCTTCGGCGCCGGC | |
| | CCCGCCCTGCAGATCCCCTTCCCCATGCAGATGGCCTACAGGTTCAAC | |
| | GGCATCGGCGTGACCCAGAACGTGCTGTACGAGAACCAGAAGCTGATC | |
| | GCCAACCAGTTCAACAGCGCCATCGGCAAGATCCAGGACAGCCTGAGC | |
| | AGCACCCCCAGCGCCCTGGGCAAGCTGCAGGACGTGGTGAACCAGAA | |
| | CGCCCAGGCCCTGAACACCCTGGTGAAGCAGCTGAGCAGCAACTTCG | |
| | GCGCCATCAGCAGCGTGCTGAACGACATCCTGAGCAGGCTGGACCCC | |
| | CCCGAGGCCGAGGTGCAGATCGACAGGCTGATCACCGGCAGGCTGCA | |
| | GAGCCTGCAGACCTACGTGACCCAGCAGCTGATCAGGGCCGCCGAGA | |
| | TCAGGGCCAGCGCCAACCTGGCCGCCACCAAGATGAGCGAGTGCGTG | |
| | CTGGGCCAGAGCAAGAGGGTGGACTTCTGCGGCAAGGGCTACCACCT | |
| | GATGAGCTTCCCCCAGAGCGCCCCCCACGGCGTGGTGTTCCTGCACG | |
| | TGACCTACGTGCCCGCCCAGGAGAAGAACTTCACCACCGCCCCCGCCA | |
| | TCTGCCACGACGGCAAGGCCCACTTCCCCAGGGAGGGCGTGTTCGTG | |
| | AGCAACGGCACCCACTGGTTCGTGACCCAGAGGAACTTCTACGAGCCC | |
| | CAGATCATCACCACCGACAACACCTTCGTGAGCGGCAACTGCGACGTG | |
| | GTGATCGGCATCGTGAACAACACCGTGTACGACCCCCTGCAGCCCGAG | |
| | CTGGACAGCTTCAAGGAGGAGCTGGACAAGTACTTCAAGAACCACACC | |
| | AGCCCCGACGTGGACCTGGGCGACATCAGCGGCATCAACGCCAGCGT | |
| | GGTGAACATCCAGAAGGAGATCGACAGGCTGAACGAGGTGGCCAAGA | |
| | ACCTGAACGAGAGCCTGATCGACCTGCAGGAGCTGGGCAAGTACGAG | |
| | CAGTACATCAAGTGGCCCTGGTACATCTGGCTGGGCTTCATCGCCGGC | |
| | CTGATCGCCATCGTGATGGTGACCATCATGCTGTGCTGCATGACCAGC | |
| | TGCTGCAGCTGCCTGAAGGGCTGCTGCAGCTGCGGCAGCTGCTGCAA | |
| | GTTCGACGAGGACGACAGCGAGCCCGTGCTGAAGGGCGTGAAGCTGC | |
| | ACTACACCGGAAGCGGAGCCACGAACTTCTCTCTGTTAAAGCAAGCAG | |
| | GAGATGTTGAAGAAAACCCCGGGCCTATGAGCGACAACGGCCCCCAG | |
| | AACCAGAGGAACGCCCCCAGGATCACCTTCGGCGGCCCCAGCGACA | |
| | GCACCGGCAGCAACCAGAACGGCGAGAGGAGCGGCGCCAGGAGCA | |
| | AGCAGAGGAGGCCCCAGGGCCTGCCCAACAACACCGCCAGCTGGTT | |
| | CACCGCCCTGACCCAGCACGGCAAGGAGGACCTGAAGTTCCCCAGG | |
| | GGCCAGGGCGTGCCCATCAACACCAACAGCAGCCCCGACGACCAGA | |
| | TCGGCTACTACAGGAGGGCCACCAGGAGGATCAGGGGCGGCGACGG | |
| | CAAGATGAAGGACCTGAGCCCCAGGTGGTACTTCTACTACCTGGGCA | |
| | CCGGCCCCGAGGCCGGCCTGCCCTACGGCGCCAACAAGGACGGCAT | |
| | CATCTGGGTGGCCACCGAGGGCGCCCTGAACACCCCCAAGGACCAC | |
| | ATCGGCACCAGGAACCCCGCCAACAACGCCGCCATCGTGCTGCAGCT | |
| | GCCCCAGGGCACCACCCTGCCCAAGGGCTTCTACGCCGAGGGCAGC | |
| | AGGGGCGGCAGCCAGGCCAGCAGCAGGAGCAGCAGCAGGAGCAGG | |
| | AACAGCAGCAGGAACAGCACCCCCGGCAGCAGCAGGGGCACCAGCC | |
| | CCGCCAGGATGGCCGGCAACGGCGGCGACGCCGCCCTGGCCCTGCT | |
| | GCTGCTGGACAGGCTGAACCAGCTGGAGAGCAAGATGAGCGGCAAG | |
| | GGCCAGCAGCAGCAGGGCCAGACCGTGACCAAGAAGAGCGCCGCCG | |
| | AGGCCAGCAAGAAGCCCAGGCAGAAGAGGACCGCCACCAAGGCCTA | |
| | CAACGTGACCCAGGCCTTCGGCAGGAGGGGCCCCGAGCAGACCCAG | |
| | GGCAACTTCGGCGACCAGGAGCTGATCAGGCAGGGCACCGACTACA | |
| | AGCACTGGCCCCAGATCGCCCAGTTCGCCCCCAGCGCCAGCGCCTTC | |
| | TTCGGCATGAGCAGGATCGGCATGGAGGTGACCCCCAGCGGCACCT | |
| | GGCTGACCTACACCGGCGCCATCAAGCTGGACGACAAGGACCCCAA | |
| | CTTCAAGGACCAGGTGATCCTGCTGAACAAGCACATCGACGCCTACA | |
| | AGACCTTCCCCCCCACCGAGCCCAAGAAGGACAAGAAGAAGAAGGC | |
| | CGACGAGACCCAGGCCCTGCCCCAGAGGCAGAAGAAGCAGCAGACC | |
| | GTGACCCTGCTGCCCGCCGCCGACCTGGACGACTTCAGCAAGCAGCT | |
| | [chemical structure] | |
| [chemical structure] | CTCGACATTGATTATTGACTAGTTATTAATAGTAATCAATTACGGGGTCA TTAGTTCATAGCCCATATATGGAGTTCCGCGTTACATAACTTACGGTAAA TGGCCCGCCTGGCTGACCGCCCAACGACCCCCGCCCATTGACGTCAAT AATGACGTATGTTCCCATAGTAACGCCAATAGGGACTTTCCATTGACGT CAATGGGTGGAGTATTTACGGTAAACTGCCCACTTGGCAGTACATCAAG TGTATCATATGCCAAGTACGCCCCCTATTGACGTCAATGACGGTAAATG GCCCGCCTGGCATTATGCCCAGTACATGACCTTATGGGACTTTCCTACT TGGCAGTACATCTACGTATTAGTCATCGCTATTACCATGGTCGAGGTGA GCCCCACGTTCTGCTTCACTCTCCCCATCTCCCCCCCCTCCCCACCCC CAATTTTGTATTTATTTATTTTTTAATTATTTTGTGCAGCGATGGGGGCG GGGGGGGGGGGGGGGCGCGCGCCAGGCGGGGCGGGGCGGGGCGA GGGGCGGGGCGGGGCGAGGCGGAGAGGTGCGGCGGCAGCCAATCA GAGCGGCGCGCTCCGAAAGTTTCCTTTTATGGCGAGGCGGCGGCGGC GGCGGGCCTATAAAAAGCGAAGCGCGCGGCGGGCGGGAGTCGCTGC GCGCTGCCTTCGCCCCGTGCCCCGCTCCGCCGCCGCCTCGCGCCGCC CGCCCCGGCTCTGACTGACCGCGTTACTCCCACAGGTGAGCGGGCGG GACGGCCCTTCTCCTCCGGGCTGTAATTAGCGCTTGGTTTAATGACGG CTTGTTTCTTTTCTGTGGCTGCGTGAAAGCCTTGAGGGGCTCCGGGAG GGCCCTTTGTGCGGGGGGAGCGGCTCGGGGGGTGCGTGCGTGTGTG TGTGCGTGGGGAGCGCCGCGTGCGGCTCCGCGCTGCCCGGCGGCTG TGAGCGCTGCGGGCGCGGCGCGGGGCTTTGTGCGCTCCGCAGTGTGC GCGAGGGGAGCGCGGCCGGGGGCGGTGCCCCGCGGTGCGGGGGGG GCTGCGAGGGGAACAAAGGCTGCGTGCGGGGTGTGTGCGTGGGGGG GTGAGCAGGGGGTGTGGGCGCGTCGGTCGGGCTGCAACCCCCCCTG CACCCCCCTCCCCGAGTTGCTGAGCACGGCCCGGCTTCGGGTGCGGG GCTCCGTACGGGGCGTGGCGCGGGGCTCGCCGTGCCGGGCGGGGGG | 140 |
| | TGGCGGCAGGTGGGGGTGCCGGGCGGGGCGGGGCCGCCTCGGGCC | |
| | GGGGAGGGCTCGGGGGAGGGGCGCGGCGGCCCCCGGAGCGCCGGC | |
| | GGCTGTCGAGGCGCGGCGAGCCGCAGCCATTGCCTTTTATGGTAATCG | |
| | TGCGAGAGGGCGCAGGGACTTCCTTTGTCCCAAATCTGTGCGGAGCCG | |
| | AAATCTGGGAGGCGCCGCCGCACCCCCTCTAGCGGGCGCGGGGCGAA | |
| | GCGGTGCGGCGCCGGCAGGAAGGAAATGGGCGGGGAGGGCCTTCGT | |
| | GCGTCGCCGCGCCGCCGTCCCCTTCTCCCTCTCCAGCCTCGGGGCTG | |
| | TCCGCGGGGGGACGGCTGCCTTCGGGGGGGACGGGGCAGGGCGGG | |
| | GTTCGGCTTCTGGCGTGTGACCGGCGGCTCTAGAGCCTCTGCTAACCA | |
| | TGTTCATGCCTTCTTCTTTTTCCTACAGCTCCTGGGCAACGTGCTGGTT | |
| | ATTGTGCTGTCTCATCATTTTGGCAAAGAATTGGAGAATAAACTAGTATT | |
| | CTTCTGGTCCCCACAGACTCAGAGAGAACCCGCCACCATGTTCGTGTT | |
| | CCTGGTGCTGCTGCCCCTGGTGAGCAGCCAGTGCGTGAACCTGACCA | |
| | CCAGGACCCAGCTGCCCCCCGCCTACACCAACAGCTTCACCAGGGGC | |
| | GTGTACTACCCCGACAAGGTGTTCAGGAGCAGCGTGCTGCACAGCACC | |
| | CAGGACCTGTTCCTGCCCTTCTTCAGCAACGTGACCTGGTTCCACGCC | |
| | ATCCACGTGAGCGGCACCAACGGCACCAAGAGGTTCGACAACCCCGT | |
| | GCTGCCCTTCAACGACGGCGTGTACTTCGCCAGCACCGAGAAGAGCAA | |
| | CATCATCAGGGGCTGGATCTTCGGCACCACCCTGGACAGCAAGACCCA | |
| | GAGCCTGCTGATCGTGAACAACGCCACCAACGTGGTGATCAAGGTGTG | |
| | CGAGTTCCAGTTCTGCAACGACCCCTTCCTGGGCGTGTACTACCACAA | |
| | GAACAACAAGAGCTGGATGGAGAGCGAGTTCAGGGTGTACAGCAGCG | |
| | CCAACAACTGCACCTTCGAGTACGTGAGCCAGCCCTTCCTGATGGACC | |
| | TGGAGGGCAAGCAGGGCAACTTCAAGAACCTGAGGGAGTTCGTGTTCA | |
| | AGAACATCGACGGCTACTTCAAGATCTACAGCAAGCACACCCCCATCAA | |
| | CCTGGTGAGGGACCTGCCCCAGGGCTTCAGCGCCCTGGAGCCCCTGG | |
| | TGGACCTGCCCATCGGCATCAACATCACCAGGTTCCAGACCCTGCTGG | |
| | CCCTGCACAGGAGCTACCTGACCCCCGGCGACAGCAGCAGCGGCTGG | |
| | ACCGCCGGCGCCGCCGCCTACTACGTGGGCTACCTGCAGCCCAGGAC | |
| | CTTCCTGCTGAAGTACAACGAGAACGGCACCATCACCGACGCCGTGGA | |
| | CTGCGCCCTGGACCCCCTGAGCGAGACCAAGTGCACCCTGAAGAGCTT | |
| | CACCGTGGAGAAGGGCATCTACCAGACCAGCAACTTCAGGGTGCAGCC | |
| | CACCGAGAGCATCGTGAGGTTCCCCAACATCACCAACCTGTGCCCCTT | |
| | CGGCGAGGTGTTCAACGCCACCAGGTTCGCCAGCGTGTACGCCTGGA | |
| | ACAGGAAGAGGATCAGCAACTGCGTGGCCGACTACAGCGTGCTGTACA | |
| | ACAGCGCCAGCTTCAGCACCTTCAAGTGCTACGGCGTGAGCCCCACCA | |
| | AGCTGAACGACCTGTGCTTCACCAACGTGTACGCCGACAGCTTCGTGA | |
| | TCAGGGGCGACGAGGTGAGGCAGATCGCCCCCGGCCAGACCGGCAA | |
| | GATCGCCGACTACAACTACAAGCTGCCCGACGACTTCACCGGCTGCGT | |
| | GATCGCCTGGAACAGCAACAACCTGGACAGCAAGGTGGGCGGCAACT | |
| | ACAACTACCTGTACAGGCTGTTCAGGAAGAGCAACCTGAAGCCCTTCG | |
| | AGAGGGACATCAGCACCGAGATCTACCAGGCCGGCAGCACCCCCTGC | |
| | AACGGCGTGGAGGGCTTCAACTGCTACTTCCCCCTGCAGAGCTACGGC | |
| | TTCCAGCCCACCAACGGCGTGGGCTACCAGCCCTACAGGGTGGTGGT | |
| | GCTGAGCTTCGAGCTGCTGCACGCCCCCGCCACCGTGTGCGGCCCCA | |
| | AGAAGAGCACCAACCTGGTGAAGAACAAGTGCGTGAACTTCAACTTCAA | |
| | CGGCCTGACCGGCACCGGCGTGCTGACCGAGAGCAACAAGAAGTTCC | |
| | TGCCCTTCCAGCAGTTCGGCAGGGACATCGCCGACACCACCGACGCC | |
| | GTGAGGGACCCCCAGACCCTGGAGATCCTGGACATCACCCCCTGCAG | |
| | CTTCGGCGGCGTGAGCGTGATCACCCCCGGCACCAACACCAGCAACC | |
| | AGGTGGCCGTGCTGTACCAGGACGTGAACTGCACCGAGGTGCCCGTG | |
| | GCCATCCACGCCGACCAGCTGACCCCCACCTGGAGGGTGTACAGCAC | |
| | CGGCAGCAACGTGTTCCAGACCAGGGCCGGCTGCCTGATCGGCGCCG | |
| | AGCACGTGAACAACAGCTACGAGTGCGACATCCCCATCGGCGCCGGC | |
| | ATCTGCGCCAGCTACCAGACCCAGACCAACAGCCCCGGCAGCGCCAG | |
| | CAGCGTGGCCAGCCAGAGCATCATCGCCTACACCATGAGCCTGGGCG | |
| | CCGAGAACAGCGTGGCCTACAGCAACAACAGCATCGCCATCCCCACCA | |
| | ACTTCACCATCAGCGTGACCACCGAGATCCTGCCCGTGAGCATGACCA | |
| | AGACCAGCGTGGACTGCACCATGTACATCTGCGGCGACAGCACCGAGT | |
| | GCAGCAACCTGCTGCTGCAGTACGGCAGCTTCTGCACCCAGCTGAACA | |
| | GGGCCCTGACCGGCATCGCCGTGGAGCAGGACAAGAACACCCAGGAG | |
| | GTGTTCGCCCAGGTGAAGCAGATCTACAAGACCCCCCCCATCAAGGAC | |
| | TTCGGCGGCTTCAACTTCAGCCAGATCCTGCCCGACCCCAGCAAGCCC | |
| | AGCAAGAGGAGCCCCATCGAGGACCTGCTGTTCAACAAGGTGACCCTG | |
| | GCCGACGCCGGCTTCATCAAGCAGTACGGCGACTGCCTGGGCGACAT | |
| | CGCCGCCAGGGACCTGATCTGCGCCCAGAAGTTCAACGGCCTGACCG | |
| | TGCTGCCCCCCCTGCTGACCGACGAGATGATCGCCCAGTACACCAGCG | |
| | CCCTGCTGGCCGGCACCATCACCAGCGGCTGGACCTTCGGCGCCGGC | |
| | CCCGCCCTGCAGATCCCCTTCCCCATGCAGATGGCCTACAGGTTCAAC | |
| | GGCATCGGCGTGACCCAGAACGTGCTGTACGAGAACCAGAAGCTGATC | |
| | GCCAACCAGTTCAACAGCGCCATCGGCAAGATCCAGGACAGCCTGAGC | |
| | AGCACCCCCAGCGCCCTGGGCAAGCTGCAGGACGTGGTGAACCAGAA | |
| | CGCCCAGGCCCTGAACACCCTGGTGAAGCAGCTGAGCAGCAACTTCG | |
| | GCGCCATCAGCAGCGTGCTGAACGACATCCTGAGCAGGCTGGACCCC | |
| | CCCGAGGCCGAGGTGCAGATCGACAGGCTGATCACCGGCAGGCTGCA | |
| | GAGCCTGCAGACCTACGTGACCCAGCAGCTGATCAGGGCCGCCGAGA | |
| | TCAGGGCCAGCGCCAACCTGGCCGCCACCAAGATGAGCGAGTGCGTG | |
| | CTGGGCCAGAGCAAGAGGGTGGACTTCTGCGGCAAGGGCTACCACCT | |
| | GATGAGCTTCCCCCAGAGCGCCCCCCACGGCGTGGTGTTCCTGCACG | |
| | TGACCTACGTGCCCGCCCAGGAGAAGAACTTCACCACCGCCCCCGCCA | |
| | TCTGCCACGACGGCAAGGCCCACTTCCCCAGGGAGGGCGTGTTCGTG | |
| | AGCAACGGCACCCACTGGTTCGTGACCCAGAGGAACTTCTACGAGCCC | |
| | CAGATCATCACCACCGACAACACCTTCGTGAGCGGCAACTGCGACGTG | |
| | GTGATCGGCATCGTGAACAACACCGTGTACGACCCCCTGCAGCCCGAG | |
| | CTGGACAGCTTCAAGGAGGAGCTGGACAAGTACTTCAAGAACCACACC | |
| | AGCCCCGACGTGGACCTGGGCGACATCAGCGGCATCAACGCCAGCGT | |
| | GGTGAACATCCAGAAGGAGATCGACAGGCTGAACGAGGTGGCCAAGA | |
| | ACCTGAACGAGAGCCTGATCGACCTGCAGGAGCTGGGCAAGTACGAG | |
| | CAGTACATCAAGTGGCCCTGGTACATCTGGCTGGGCTTCATCGCCGGC | |
| | CTGATCGCCATCGTGATGGTGACCATCATGCTGTGCTGCATGACCAGC | |
| | TGCTGCAGCTGCCTGAAGGGCTGCTGCAGCTGCGGCAGCTGCTGCAA | |
| | GTTCGACGAGGACGACAGCGAGCCCGTGCTGAAGGGCGTGAAGCTGC | |
| | ACTACACCGGAAGCGGAGCCACGAACTTCTCTCTGTTAAAGCAAGCAG | |
| | GAGATGTTGAAGAAAACCCCGGGCCTCAAACCACTGAAACAGCWCAC | |
| | TCTTGTAATGTTAACCGCTTTAATGTGGCTATTACAAGAGCAAAAATTG | |
| | GCATTTTGTGCATAATGTCTGACAGAGATCTTTATGACAAGCTGCAATT | |
| | CACAAGTCTAGAAGTACCGCGTCGTAACGTGGCTACATTACAAGCGG | |
| | AAAATGTAACTGGACTCTTTAAGGACTGTAGTAAGATCATAACTGGTC | |
| | TTCATCCTACACAAGCACCTACACACCTTAGTGTTGATACAAAATTCA | |
| | AGACTGAGGGACTATGTGTTGACATACCAGGCATWCCWAAGGACAT | |
| | GACCTATMGWAGACTCATCTCYATGATGGGTTTCAAAATGAATTAYCA | |
| | AGTTAATGGTTACCCTAAYATGTTYATCACCCGYGARGAAGCCATMMG | |
| | MCAYGTWCGTGCATGGATTGGCTTTGATGTAGAGGGKTGTCATGCTA | |
| | CTAGGGATGCTGTCGGTACTAACCTACCTCTCCAGTTAGGATTTTCTA | |
| | CAGGTGTTAACTTAGTAGCTGTACCAACTGGCTATGTTGACACTGAAA | |
| | ACAATACAGAATTCACCAGAGTTAATGCAAAACCTCCACCAGGTGAC | |
| | CAATTTAAACATCTTATACCACTTATGTACAAAGGTTTACCCTGGAACA | |
| | TAGTGCGTATCAAGATAGTACAAATGCTCAGTGATACACTGAAAGGAT | |
| | TATCRGACAGAGTTGTGTTTGTCCTATGGGCACATGGCTTTGAACTTA | |
| | CATCAATGAAGTACTTTGTCAAGATTGGACCTGAAAGAACGTGTTGTC | |
| | TGTGTGACAAACGTGCAACTTGTTTTTCTACTTCATCAGACAATTATGC | |
| | CTGCTGGAACCATTCTGTGGGTTTTGACTATGTCTATAATCCATTTATG | |
| | ATTGATGTCCAGCAGTGGGGTTTTACAGGTAACCTTCAGAGTAATCAC | |
| | GATCAGCATTGCCAAGTGCATGGCAACGCTCATGTGGCTAGTTGTGAT | |
| | GCTATCATGACTAGATGTTTAGCAGTCCATGAGTGCTTTGTTAAGCGC | |
| | GTTGACTGGTCTGTTGAGTACCCAATTATAGGTGATGAACTGAAGATC | |
| | AATGCCGCATGCAGAAAAGTGCAACATATGGTTGTAAAGTCTGCATTG | |
| | CTTGCTGACAAATTCCCAGTTCTTCATGACATTGGAAACCCAAAGGCT | |
| | ATCAAATGTGTCCCRCAGGCTGAAGTGGATTGGAAGTTCTATGATGCT | |
| | CAGCCCTGCAGTGACAAAGCTTATAAAATAAAAGAACTCTTCTATTCT | |
| | TATGCTACACATCATGATAAATTCATTGATGGTGTTTGTTTATTTTGGA | |
| | ATTGTAACGTTGATCGTTACCCTGCCAATGCTATTGTRTGCAGGTTCG | |
| | ACACGAGAGTCTTGTCAAATTTGAACTTGCCAGGTTGTGATGGTGGTA | |
| | GTTTGTATGTAAATAAGCATGCATTCCACACTCCAGCTTTTGATAAAAG | |
| | TGCATTTACTAATTTAAAGCAATTGCCTTTCTTTTATTACTCTGACAGTC | |
| | CCTGTGAGTCACATGGCAAGCAGGTTGTTTCTGACATTGATTATGTAC | |
| | CACTCAAATCTGCTACRTGTATAACACGATGCAATTTGGGRGGTGCTG | |
| | TTTGCAGACATCATGCAAATGAGTACCGACAGTACTTGGATGCATACA | |
| | ATATGATGATTTCTGCTGGCTTTAGCCTCTGGATTTACAAACAGTTTGA | |
| | CACTTATAACCTGTGGAACACCTTTACCAGGTTACAGAGTTTAGAAAA | |
| | TGTGGCTTACAATGTTGTTAACAAAGGACACTTCGATGGACAAGCTGG | |
| | TGAAGCACCTGTTTCCGTCATTAATAATGTTGTTTACACAAAGGTAGAT | |
| | GGTGTTGATGTAGAGATCTTTGAAAACAAGACAACACTTCCTGTTAAT | |
| | GTTGCATTTGAGCTTTGGGCTAAGCGTAACATTAAACCAGTGCCAGAG | |
| | ATTAAGATACTCAATAATTTGGGTGTCGATATCGCTGCTAATACTGTAA | |
| | TCTGGGACTACAAGAGAGAAGCACCAGCACATATGTCAACAATAGGT | |
| | GTCTGCACAATGACTGACATTGCCAAGAAACCTACTGAGAGTGCTTGT | |
| | TCCTCGCTTACTGTCTTATTTGATGGTAGAGTGGAAGGACAGGTAGAC | |
| | CTTTTTAGAAATGCCCGTAATGGTGTTTTAATAACAGAAGGTTCAGTTA | |
| | AAGGTTTAATACCTTCAAAGGGACCAGCACAAGCTAGTGTCAATGGA | |
| | GTCACATTAATTGGAGAATCAGTAAAAACACAGTTTAATTATTTTAAGA | |
| | AAGTAGATGGCATCATTCAACAGTTGCCTGAAACCTACTTTACTCAGA | |
| | GCCGAGACTTAGAGGATTTCAAGCCCAGATCACAAATGGAAACTGAC | |
| | TTTCTTGAGCTCGCTATGGATGAATTCATACAACGGTACAAGCTTGAA | |
| | GGCTATGCCTTCGAACATATCGTTTATGGAGATTTTAGTCATGGACAG | |
| | CTTGGTGGACTTCATCTAATGATTGGTCTAGCTAAGCGCTCACAAGAT | |
| | TCACCACTTAAATTAGAGGATTTTATCCCTACGGACAGTACAGTGAAA | |
| | AATTATTTCATAACAGATGCGCAAACAGGTTCATCAAAATGCGTGTGC | |
| | TCTGTTATTGATCTTCTGCTTGATGACTTTGTTGAGATAATAAAGTCAC | |
| | AAGATTTATCAGTGGTTTCAAAGGTGGTCAAAGTCACAATTGACTATG | |
| | CTGAAATTTCATTCATGTTATGGTGTAAGGATGGACATGTTGAAACCTT | |
| | TTACCCAAAATTACAAGCGAGTCAGGCGTGGCAACCAGGAGTTGCAA | |
| | TGCCTAACTTGTATAAGATGCAGAGAATGCTTCTTGAAAAATGTGACC | |
| | TTCAGAATTATGGTGAAAATGCTGTCATACCAAARGGAATAATGATGA | |
| | ATGTCGCAAAATATACTCAACTGTGTCAATATTTAAATACACTYACATT | |
| | AGCYGTGCCATATAATATGAGAGTTATCCATTTTGGTGCTGGCTCRGA | |
| | CAAAGGAGTTGCACCCGGCACAGCTGTTCTCAGACAGTGGTTGCCAA | |
| | TTGGCACACTACTTGTTGATTCAGATCTTAACGACTTCGTCTCTGACGC | |
| | TGATTCCACTCTAATTGGAGACTGTGCAACCGTACATACAGCTAACAA | |
| | ATGGGATCTCATTATTAGCGATATGTATGATCCTAAAACCAAACACGT | |
| | GACAAAGGAAAATGATTCAAAAGAAGGATTTTTCACTTACCTGTGTGG | |
| | ATTTATTAAACAAAAATTAGCCCTGGGAGGCTCTGTGGCTGTAAAGAT | |
| | AACTGAGCATTCTTGGAATGCGGATCTCTACAAGCTCATGGGACATTT | |
| | CTCATGGTGGACAGCTTTTGTTACAAATGTTAATGCATCTTCATCAGAA | |
| | GCATTTTTAATTGGAGTTAACTATCTTGGTAAGCCAAAAGAACAAATT | |
| | GATGGTTACACCATGCATGCTAACTACATTTTCTGGAGGAATACAAAC | |
| | CCGATTCAATTGTCTTCCTATTCACTTTTTGACATGAGTAAGTTCCCTC | |
| | TTAAATTAAGGGGAACAGCTGTCATGTCTTTAAAGGAGAACCAAATCA | |
| | ATGAAATGATTTATTCTCTACTTGAAAAAGGCAGACTTATCATTAGGG | |
| | AAAACAACAGAGTTGTTGTCTCAAGTGATGTTCTTGTTAATAACTAAAC | |
| | [chemical structure] | |
| [chemical structure] | CTCGACATTGATTATTGACTAGTTATTAATAGTAATCAATTACGGGGTCA TTAGTTCATAGCCCATATATGGAGTTCCGCGTTACATAACTTACGGTAAA TGGCCCGCCTGGCTGACCGCCCAACGACCCCCGCCCATTGACGTCAAT AATGACGTATGTTCCCATAGTAACGCCAATAGGGACTTTCCATTGACGT CAATGGGTGGAGTATTTACGGTAAACTGCCCACTTGGCAGTACATCAAG TGTATCATATGCCAAGTACGCCCCCTATTGACGTCAATGACGGTAAATG GCCCGCCTGGCATTATGCCCAGTACATGACCTTATGGGACTTTCCTACT TGGCAGTACATCTACGTATTAGTCATCGCTATTACCATGGTCGAGGTGA GCCCCACGTTCTGCTTCACTCTCCCCATCTCCCCCCCCTCCCCACCCC CAATTTTGTATTTATTTATTTTTTAATTATTTTGTGCAGCGATGGGGGCG GGGGGGGGGGGGGGGCGCGCGCCAGGCGGGGCGGGGCGGGGCGA GGGGCGGGGCGGGGCGAGGCGGAGAGGTGCGGCGGCAGCCAATCA GAGCGGCGCGCTCCGAAAGTTTCCTTTTATGGCGAGGCGGCGGCGGC GGCGGCCCTATAAAAAGCGAAGCGCGCGGCGGGCGGGAGTCGCTGC GCGCTGCCTTCGCCCCGTGCCCCGCTCCGCCGCCGCCTCGCGCCGCC CGCCCCGGCTCTGACTGACCGCGTTACTCCCACAGGTGAGCGGGCGG GACGGCCCTTCTCCTCCGGGCTGTAATTAGCGCTTGGTTTAATGACGG CTTGTTTCTTTTCTGTGGCTGCGTGAAAGCCTTGAGGGGCTCCGGGAG GGCCCTTTGTGCGGGGGGAGCGGCTCGGGGGGTGCGTGCGTGTGTG TGTGCGTGGGGAGCGCCGCGTGCGGCTCCGCGCTGCCCGGCGGCTG TGAGCGCTGCGGGCGCGGCGCGGGGCTTTGTGCGCTCCGCAGTGTGC GCGAGGGGAGCGCGGCCGGGGGCGGTGCCCCGCGGTGCGGGGGGG GCTGCGAGGGGAACAAAGGCTGCGTGCGGGGTGTGTGCGTGGGGGG GTGAGCAGGGGGTGTGGGCGCGTCGGTCGGGCTGCAACCCCCCCTG CACCCCCCTCCCCGAGTTGCTGAGCACGGCCCGGCTTCGGGTGCGGG | 141 |
| | GCTCCGTACGGGGCGTGGCGCGGGGCTCGCCGTGCCGGGCGGGGGG | |
| | TGGCGGCAGGTGGGGGTGCCGGGCGGGGCGGGGCCGCCTCGGGCC | |
| | GGGGAGGGCTCGGGGGAGGGGCGCGGCGGCCCCCGGAGCGCCGGC | |
| | GGCTGTCGAGGCGCGGCGAGCCGCAGCCATTGCCTTTTATGGTAATCG | |
| | TGCGAGAGGGCGCAGGGACTTCCTTTGTCCCAAATCTGTGCGGAGCCG | |
| | AAATCTGGGAGGCGCCGCCGCACCCCCTCTAGCGGGCGCGGGGCGAA | |
| | GCGGTGCGGCGCCGGCAGGAAGGAAATGGGCGGGGAGGGCCTTCGT | |
| | GCGTCGCCGCGCCGCCGTCCCCTTCTCCCTCTCCAGCCTCGGGGCTG | |
| | TCCGCGGGGGGACGGCTGCCTTCGGGGGGGACGGGGCAGGGCGGG | |
| | GTTCGGCTTCTGGCGTGTGACCGGCGGCTCTAGAGCCTCTGCTAACCA | |
| | TGTTCATGCCTTCTTCTTTTTCCTACAGCTCCTGGGCAACGTGCTGGTT | |
| | ATTGTGCTGTCTCATCATTTTGGCAAAGAATTGGAGAATAAACTAGTATT | |
| | CTTCTGGTCCCCACAGACTCAGAGAGAACCCGCCACCATGTTCGTGTT | |
| | CCTGGTGCTGCTGCCCCTGGTGAGCAGCCAGTGCGTGAACCTGACCA | |
| | CCAGGACCCAGCTGCCCCCCGCCTACACCAACAGCTTCACCAGGGGC | |
| | GTGTACTACCCCGACAAGGTGTTCAGGAGCAGCGTGCTGCACAGCACC | |
| | CAGGACCTGTTCCTGCCCTTCTTCAGCAACGTGACCTGGTTCCACGCC | |
| | ATCCACGTGAGCGGCACCAACGGCACCAAGAGGTTCGACAACCCCGT | |
| | GCTGCCCTTCAACGACGGCGTGTACTTCGCCAGCACCGAGAAGAGCAA | |
| | CATCATCAGGGGCTGGATCTTCGGCACCACCCTGGACAGCAAGACCCA | |
| | GAGCCTGCTGATCGTGAACAACGCCACCAACGTGGTGATCAAGGTGTG | |
| | CGAGTTCCAGTTCTGCAACGACCCCTTCCTGGGCGTGTACTACCACAA | |
| | GAACAACAAGAGCTGGATGGAGAGCGAGTTCAGGGTGTACAGCAGCG | |
| | CCAACAACTGCACCTTCGAGTACGTGAGCCAGCCCTTCCTGATGGACC | |
| | TGGAGGGCAAGCAGGGCAACTTCAAGAACCTGAGGGAGTTCGTGTTCA | |
| | AGAACATCGACGGCTACTTCAAGATCTACAGCAAGCACACCCCCATCAA | |
| | CCTGGTGAGGGACCTGCCCCAGGGCTTCAGCGCCCTGGAGCCCCTGG | |
| | TGGACCTGCCCATCGGCATCAACATCACCAGGTTCCAGACCCTGCTGG | |
| | CCCTGCACAGGAGCTACCTGACCCCCGGCGACAGCAGCAGCGGCTGG | |
| | ACCGCCGGCGCCGCCGCCTACTACGTGGGCTACCTGCAGCCCAGGAC | |
| | CTTCCTGCTGAAGTACAACGAGAACGGCACCATCACCGACGCCGTGGA | |
| | CTGCGCCCTGGACCCCCTGAGCGAGACCAAGTGCACCCTGAAGAGCTT | |
| | CACCGTGGAGAAGGGCATCTACCAGACCAGCAACTTCAGGGTGCAGCC | |
| | CACCGAGAGCATCGTGAGGTTCCCCAACATCACCAACCTGTGCCCCTT | |
| | CGGCGAGGTGTTCAACGCCACCAGGTTCGCCAGCGTGTACGCCTGGA | |
| | ACAGGAAGAGGATCAGCAACTGCGTGGCCGACTACAGCGTGCTGTACA | |
| | ACAGCGCCAGCTTCAGCACCTTCAAGTGCTACGGCGTGAGCCCCACCA | |
| | AGCTGAACGACCTGTGCTTCACCAACGTGTACGCCGACAGCTTCGTGA | |
| | TCAGGGGCGACGAGGTGAGGCAGATCGCCCCCGGCCAGACCGGCAA | |
| | GATCGCCGACTACAACTACAAGCTGCCCGACGACTTCACCGGCTGCGT | |
| | GATCGCCTGGAACAGCAACAACCTGGACAGCAAGGTGGGCGGCAACT | |
| | ACAACTACCTGTACAGGCTGTTCAGGAAGAGCAACCTGAAGCCCTTCG | |
| | AGAGGGACATCAGCACCGAGATCTACCAGGCCGGCAGCACCCCCTGC | |
| | AACGGCGTGGAGGGCTTCAACTGCTACTTCCCCCTGCAGAGCTACGGC | |
| | TTCCAGCCCACCAACGGCGTGGGCTACCAGCCCTACAGGGTGGTGGT | |
| | GCTGAGCTTCGAGCTGCTGCACGCCCCCGCCACCGTGTGCGGCCCCA | |
| | AGAAGAGCACCAACCTGGTGAAGAACAAGTGCGTGAACTTCAACTTCAA | |
| | CGGCCTGACCGGCACCGGCGTGCTGACCGAGAGCAACAAGAAGTTCC | |
| | TGCCCTTCCAGCAGTTCGGCAGGGACATCGCCGACACCACCGACGCC | |
| | GTGAGGGACCCCCAGACCCTGGAGATCCTGGACATCACCCCCTGCAG | |
| | CTTCGGCGGCGTGAGCGTGATCACCCCCGGCACCAACACCAGCAACC | |
| | AGGTGGCCGTGCTGTACCAGGACGTGAACTGCACCGAGGTGCCCGTG | |
| | GCCATCCACGCCGACCAGCTGACCCCCACCTGGAGGGTGTACAGCAC | |
| | CGGCAGCAACGTGTTCCAGACCAGGGCCGGCTGCCTGATCGGCGCCG | |
| | AGCACGTGAACAACAGCTACGAGTGCGACATCCCCATCGGCGCCGGC | |
| | ATCTGCGCCAGCTACCAGACCCAGACCAACAGCCCCGGCAGCGCCAG | |
| | CAGCGTGGCCAGCCAGAGCATCATCGCCTACACCATGAGCCTGGGCG | |
| | CCGAGAACAGCGTGGCCTACAGCAACAACAGCATCGCCATCCCCACCA | |
| | ACTTCACCATCAGCGTGACCACCGAGATCCTGCCCGTGAGCATGACCA | |
| | AGACCAGCGTGGACTGCACCATGTACATCTGCGGCGACAGCACCGAGT | |
| | GCAGCAACCTGCTGCTGCAGTACGGCAGCTTCTGCACCCAGCTGAACA | |
| | GGGCCCTGACCGGCATCGCCGTGGAGCAGGACAAGAACACCCAGGAG | |
| | GTGTTCGCCCAGGTGAAGCAGATCTACAAGACCCCCCCCATCAAGGAC | |
| | TTCGGCGGCTTCAACTTCAGCCAGATCCTGCCCGACCCCAGCAAGCCC | |
| | AGCAAGAGGAGCCCCATCGAGGACCTGCTGTTCAACAAGGTGACCCTG | |
| | GCCGACGCCGGCTTCATCAAGCAGTACGGCGACTGCCTGGGCGACAT | |
| | CGCCGCCAGGGACCTGATCTGCGCCCAGAAGTTCAACGGCCTGACCG | |
| | TGCTGCCCCCCCTGCTGACCGACGAGATGATCGCCCAGTACACCAGCG | |
| | CCCTGCTGGCCGGCACCATCACCAGCGGCTGGACCTTCGGCGCCGGC | |
| | CCCGCCCTGCAGATCCCCTTCCCCATGCAGATGGCCTACAGGTTCAAC | |
| | GGCATCGGCGTGACCCAGAACGTGCTGTACGAGAACCAGAAGCTGATC | |
| | GCCAACCAGTTCAACAGCGCCATCGGCAAGATCCAGGACAGCCTGAGC | |
| | AGCACCCCCAGCGCCCTGGGCAAGCTGCAGGACGTGGTGAACCAGAA | |
| | CGCCCAGGCCCTGAACACCCTGGTGAAGCAGCTGAGCAGCAACTTCG | |
| | GCGCCATCAGCAGCGTGCTGAACGACATCCTGAGCAGGCTGGACCCC | |
| | CCCGAGGCCGAGGTGCAGATCGACAGGCTGATCACCGGCAGGCTGCA | |
| | GAGCCTGCAGACCTACGTGACCCAGCAGCTGATCAGGGCCGCCGAGA | |
| | TCAGGGCCAGCGCCAACCTGGCCGCCACCAAGATGAGCGAGTGCGTG | |
| | CTGGGCCAGAGCAAGAGGGTGGACTTCTGCGGCAAGGGCTACCACCT | |
| | GATGAGCTTCCCCCAGAGCGCCCCCCACGGCGTGGTGTTCCTGCACG | |
| | TGACCTACGTGCCCGCCCAGGAGAAGAACTTCACCACCGCCCCCGCCA | |
| | TCTGCCACGACGGCAAGGCCCACTTCCCCAGGGAGGGCGTGTTCGTG | |
| | AGCAACGGCACCCACTGGTTCGTGACCCAGAGGAACTTCTACGAGCCC | |
| | CAGATCATCACCACCGACAACACCTTCGTGAGCGGCAACTGCGACGTG | |
| | GTGATCGGCATCGTGAACAACACCGTGTACGACCCCCTGCAGCCCGAG | |
| | CTGGACAGCTTCAAGGAGGAGCTGGACAAGTACTTCAAGAACCACACC | |
| | AGCCCCGACGTGGACCTGGGCGACATCAGCGGCATCAACGCCAGCGT | |
| | GGTGAACATCCAGAAGGAGATCGACAGGCTGAACGAGGTGGCCAAGA | |
| | ACCTGAACGAGAGCCTGATCGACCTGCAGGAGCTGGGCAAGTACGAG | |
| | CAGTACATCAAGTGGCCCTGGTACATCTGGCTGGGCTTCATCGCCGGC | |
| | CTGATCGCCATCGTGATGGTGACCATCATGCTGTGCTGCATGACCAGC | |
| | TGCTGCAGCTGCCTGAAGGGCTGCTGCAGCTGCGGCAGCTGCTGCAA | |
| | GTTCGACGAGGACGACAGCGAGCCCGTGCTGAAGGGCGTGAAGCTGC | |
| | ACTACACCGGAAGCGGAGCCACGAACTTCTCTCTGTTAAAGCAAGCAG | |
| | [chemical structure] | |
| | AACTTCTCTCTGTTAAAGCAAGCAGGAGATGTTGAAGAAAACCCCGGGC | |
| | CTATGAAGATCATCCTGTTCCTGGCCCTGATCACCCTGGCCACCTGCG | |
| | [chemical structure] | |
| [chemical structure] | CTCGACATTGATTATTGACTAGTTATTAATAGTAATCAATTACGGGGTCA TTAGTTCATAGCCCATATATGGAGTTCCGCGTTACATAACTTACGGTAAA TGGCCCGCCTGGCTGACCGCCCAACGACCCCCGCCCATTGACGTCAAT AATGACGTATGTTCCCATAGTAACGCCAATAGGGACTTTCCATTGACGT CAATGGGTGGAGTATTTACGGTAAACTGCCCACTTGGCAGTACATCAAG TGTATCATATGCCAAGTACGCCCCCTATTGACGTCAATGACGGTAAATG GCCCGCCTGGCATTATGCCCAGTACATGACCTTATGGGACTTTCCTACT TGGCAGTACATCTACGTATTAGTCATCGCTATTACCATGGTCGAGGTGA GCCCCACGTTCTGCTTCACTCTCCCCATCTCCCCCCCCTCCCCACCCC CAATTTTGTATTTATTTATTTTTTAATTATTTTGTGCAGCGATGGGGGCG GGGGGGGGGGGGGGGCGCGCGCCAGGCGGGGCGGGGCGGGGCGA GGGGCGGGGCGGGGCGAGGCGGAGAGGTGCGGCGGCAGCCAATCA GAGCGGCGCGCTCCGAAAGTTTCCTTTTATGGCGAGGCGGCGGCGGC GGCGGCCCTATAAAAAGCGAAGCGCGCGGCGGGCGGGAGTCGCTGC GCGCTGCCTTCGCCCCGTGCCCCGCTCCGCCGCCGCCTCGCGCCGCC CGCCCCGGCTCTGACTGACCGCGTTACTCCCACAGGTGAGCGGGCGG GACGGCCCTTCTCCTCCGGGCTGTAATTAGCGCTTGGTTTAATGACGG CTTGTTTCTTTTCTGTGGCTGCGTGAAAGCCTTGAGGGGCTCCGGGAG GGCCCTTTGTGCGGGGGGAGCGGCTCGGGGGGTGCGTGCGTGTGTG TGTGCGTGGGGAGCGCCGCGTGCGGCTCCGCGCTGCCCGGCGGCTG TGAGCGCTGCGGGCGCGGCGCGGGGCTTTGTGCGCTCCGCAGTGTGC GCGAGGGGAGCGCGGCCGGGGGCGGTGCCCCGCGGTGCGGGGGGG GCTGCGAGGGGAACAAAGGCTGCGTGCGGGGTGTGTGCGTGGGGGG GTGAGCAGGGGGTGTGGGCGCGTCGGTCGGGCTGCAACCCCCCCTG | 142 |
| | CACCCCCCTCCCCGAGTTGCTGAGCACGGCCCGGCTTCGGGTGCGGG | |
| | GCTCCGTACGGGGCGTGGCGCGGGGCTCGCCGTGCCGGGCGGGGGG | |
| | TGGCGGCAGGTGGGGGTGCCGGGCGGGGCGGGGCCGCCTCGGGCC | |
| | GGGGAGGGCTCGGGGGAGGGGCGCGGCGGCCCCCGGAGCGCCGGC | |
| | GGCTGTCGAGGCGCGGCGAGCCGCAGCCATTGCCTTTTATGGTAATCG | |
| | TGCGAGAGGGCGCAGGGACTTCCTTTGTCCCAAATCTGTGCGGAGCCG | |
| | AAATCTGGGAGGCGCCGCCGCACCCCCTCTAGCGGGCGCGGGGCGAA | |
| | GCGGTGCGGCGCCGGCAGGAAGGAAATGGGCGGGGAGGGCCTTCGT | |
| | GCGTCGCCGCGCCGCCGTCCCCTTCTCCCTCTCCAGCCTCGGGGCTG | |
| | TCCGCGGGGGGACGGCTGCCTTCGGGGGGGACGGGGCAGGGCGGG | |
| | GTTCGGCTTCTGGCGTGTGACCGGCGGCTCTAGAGCCTCTGCTAACCA | |
| | TGTTCATGCCTTCTTCTTTTTCCTACAGCTCCTGGGCAACGTGCTGGTT | |
| | ATTGTGCTGTCTCATCATTTTGGCAAAGAATTGGAGAATAAACTAGTATT | |
| | CTTCTGGTCCCCACAGACTCAGAGAGAACCCGCCACCATGTTCGTGTT | |
| | CCTGGTGCTGCTGCCCCTGGTGAGCAGCCAGTGCGTGAACCTGACCA | |
| | CCAGGACCCAGCTGCCCCCCGCCTACACCAACAGCTTCACCAGGGGC | |
| | GTGTACTACCCCGACAAGGTGTTCAGGAGCAGCGTGCTGCACAGCACC | |
| | CAGGACCTGTTCCTGCCCTTCTTCAGCAACGTGACCTGGTTCCACGCC | |
| | ATCCACGTGAGCGGCACCAACGGCACCAAGAGGTTCGACAACCCCGT | |
| | GCTGCCCTTCAACGACGGCGTGTACTTCGCCAGCACCGAGAAGAGCAA | |
| | CATCATCAGGGGCTGGATCTTCGGCACCACCCTGGACAGCAAGACCCA | |
| | GAGCCTGCTGATCGTGAACAACGCCACCAACGTGGTGATCAAGGTGTG | |
| | CGAGTTCCAGTTCTGCAACGACCCCTTCCTGGGCGTGTACTACCACAA | |
| | GAACAACAAGAGCTGGATGGAGAGCGAGTTCAGGGTGTACAGCAGCG | |
| | CCAACAACTGCACCTTCGAGTACGTGAGCCAGCCCTTCCTGATGGACC | |
| | TGGAGGGCAAGCAGGGCAACTTCAAGAACCTGAGGGAGTTCGTGTTCA | |
| | AGAACATCGACGGCTACTTCAAGATCTACAGCAAGCACACCCCCATCAA | |
| | CCTGGTGAGGGACCTGCCCCAGGGCTTCAGCGCCCTGGAGCCCCTGG | |
| | TGGACCTGCCCATCGGCATCAACATCACCAGGTTCCAGACCCTGCTGG | |
| | CCCTGCACAGGAGCTACCTGACCCCCGGCGACAGCAGCAGCGGCTGG | |
| | ACCGCCGGCGCCGCCGCCTACTACGTGGGCTACCTGCAGCCCAGGAC | |
| | CTTCCTGCTGAAGTACAACGAGAACGGCACCATCACCGACGCCGTGGA | |
| | CTGCGCCCTGGACCCCCTGAGCGAGACCAAGTGCACCCTGAAGAGCTT | |
| | CACCGTGGAGAAGGGCATCTACCAGACCAGCAACTTCAGGGTGCAGCC | |
| | CACCGAGAGCATCGTGAGGTTCCCCAACATCACCAACCTGTGCCCCTT | |
| | CGGCGAGGTGTTCAACGCCACCAGGTTCGCCAGCGTGTACGCCTGGA | |
| | ACAGGAAGAGGATCAGCAACTGCGTGGCCGACTACAGCGTGCTGTACA | |
| | ACAGCGCCAGCTTCAGCACCTTCAAGTGCTACGGCGTGAGCCCCACCA | |
| | AGCTGAACGACCTGTGCTTCACCAACGTGTACGCCGACAGCTTCGTGA | |
| | TCAGGGGCGACGAGGTGAGGCAGATCGCCCCCGGCCAGACCGGCAA | |
| | GATCGCCGACTACAACTACAAGCTGCCCGACGACTTCACCGGCTGCGT | |
| | GATCGCCTGGAACAGCAACAACCTGGACAGCAAGGTGGGCGGCAACT | |
| | ACAACTACCTGTACAGGCTGTTCAGGAAGAGCAACCTGAAGCCCTTCG | |
| | AGAGGGACATCAGCACCGAGATCTACCAGGCCGGCAGCACCCCCTGC | |
| | AACGGCGTGGAGGGCTTCAACTGCTACTTCCCCCTGCAGAGCTACGGC | |
| | TTCCAGCCCACCAACGGCGTGGGCTACCAGCCCTACAGGGTGGTGGT | |
| | GCTGAGCTTCGAGCTGCTGCACGCCCCCGCCACCGTGTGCGGCCCCA | |
| | AGAAGAGCACCAACCTGGTGAAGAACAAGTGCGTGAACTTCAACTTCAA | |
| | CGGCCTGACCGGCACCGGCGTGCTGACCGAGAGCAACAAGAAGTTCC | |
| | TGCCCTTCCAGCAGTTCGGCAGGGACATCGCCGACACCACCGACGCC | |
| | GTGAGGGACCCCCAGACCCTGGAGATCCTGGACATCACCCCCTGCAG | |
| | CTTCGGCGGCGTGAGCGTGATCACCCCCGGCACCAACACCAGCAACC | |
| | AGGTGGCCGTGCTGTACCAGGACGTGAACTGCACCGAGGTGCCCGTG | |
| | GCCATCCACGCCGACCAGCTGACCCCCACCTGGAGGGTGTACAGCAC | |
| | CGGCAGCAACGTGTTCCAGACCAGGGCCGGCTGCCTGATCGGCGCCG | |
| | AGCACGTGAACAACAGCTACGAGTGCGACATCCCCATCGGCGCCGGC | |
| | ATCTGCGCCAGCTACCAGACCCAGACCAACAGCCCCGGCAGCGCCAG | |
| | CAGCGTGGCCAGCCAGAGCATCATCGCCTACACCATGAGCCTGGGCG | |
| | CCGAGAACAGCGTGGCCTACAGCAACAACAGCATCGCCATCCCCACCA | |
| | ACTTCACCATCAGCGTGACCACCGAGATCCTGCCCGTGAGCATGACCA | |
| | AGACCAGCGTGGACTGCACCATGTACATCTGCGGCGACAGCACCGAGT | |
| | GCAGCAACCTGCTGCTGCAGTACGGCAGCTTCTGCACCCAGCTGAACA | |
| | GGGCCCTGACCGGCATCGCCGTGGAGCAGGACAAGAACACCCAGGAG | |
| | GTGTTCGCCCAGGTGAAGCAGATCTACAAGACCCCCCCCATCAAGGAC | |
| | TTCGGCGGCTTCAACTTCAGCCAGATCCTGCCCGACCCCAGCAAGCCC | |
| | AGCAAGAGGAGCCCCATCGAGGACCTGCTGTTCAACAAGGTGACCCTG | |
| | GCCGACGCCGGCTTCATCAAGCAGTACGGCGACTGCCTGGGCGACAT | |
| | CGCCGCCAGGGACCTGATCTGCGCCCAGAAGTTCAACGGCCTGACCG | |
| | TGCTGCCCCCCCTGCTGACCGACGAGATGATCGCCCAGTACACCAGCG | |
| | CCCTGCTGGCCGGCACCATCACCAGCGGCTGGACCTTCGGCGCCGGC | |
| | CCCGCCCTGCAGATCCCCTTCCCCATGCAGATGGCCTACAGGTTCAAC | |
| | GGCATCGGCGTGACCCAGAACGTGCTGTACGAGAACCAGAAGCTGATC | |
| | GCCAACCAGTTCAACAGCGCCATCGGCAAGATCCAGGACAGCCTGAGC | |
| | AGCACCCCCAGCGCCCTGGGCAAGCTGCAGGACGTGGTGAACCAGAA | |
| | CGCCCAGGCCCTGAACACCCTGGTGAAGCAGCTGAGCAGCAACTTCG | |
| | GCGCCATCAGCAGCGTGCTGAACGACATCCTGAGCAGGCTGGACCCC | |
| | CCCGAGGCCGAGGTGCAGATCGACAGGCTGATCACCGGCAGGCTGCA | |
| | GAGCCTGCAGACCTACGTGACCCAGCAGCTGATCAGGGCCGCCGAGA | |
| | TCAGGGCCAGCGCCAACCTGGCCGCCACCAAGATGAGCGAGTGCGTG | |
| | CTGGGCCAGAGCAAGAGGGTGGACTTCTGCGGCAAGGGCTACCACCT | |
| | GATGAGCTTCCCCCAGAGCGCCCCCCACGGCGTGGTGTTCCTGCACG | |
| | TGACCTACGTGCCCGCCCAGGAGAAGAACTTCACCACCGCCCCCGCCA | |
| | TCTGCCACGACGGCAAGGCCCACTTCCCCAGGGAGGGCGTGTTCGTG | |
| | AGCAACGGCACCCACTGGTTCGTGACCCAGAGGAACTTCTACGAGCCC | |
| | CAGATCATCACCACCGACAACACCTTCGTGAGCGGCAACTGCGACGTG | |
| | GTGATCGGCATCGTGAACAACACCGTGTACGACCCCCTGCAGCCCGAG | |
| | CTGGACAGCTTCAAGGAGGAGCTGGACAAGTACTTCAAGAACCACACC | |
| | AGCCCCGACGTGGACCTGGGCGACATCAGCGGCATCAACGCCAGCGT | |
| | GGTGAACATCCAGAAGGAGATCGACAGGCTGAACGAGGTGGCCAAGA | |
| | ACCTGAACGAGAGCCTGATCGACCTGCAGGAGCTGGGCAAGTACGAG | |
| | CAGTACATCAAGTGGCCCTGGTACATCTGGCTGGGCTTCATCGCCGGC | |
| | CTGATCGCCATCGTGATGGTGACCATCATGCTGTGCTGCATGACCAGC | |
| | TGCTGCAGCTGCCTGAAGGGCTGCTGCAGCTGCGGCAGCTGCTGCAA | |
| | GTTCGACGAGGACGACAGCGAGCCCGTGCTGAAGGGCGTGAAGCTGC | |
| | ACTACACCGGAAGCGGAGCCACGAACTTCTCTCTGTTAAAGCAAGCAG | |
| | [chemical structure] | |
| | [chemical structure] | |
| [chemical structure] | CTCGACATTGATTATTGACTAGTTATTAATAGTAATCAATTACGGGGTCA TTAGTTCATAGCCCATATATGGAGTTCCGCGTTACATAACTTACGGTAAA TGGCCCGCCTGGCTGACCGCCCAACGACCCCCGCCCATTGACGTCAAT AATGACGTATGTTCCCATAGTAACGCCAATAGGGACTTTCCATTGACGT CAATGGGTGGAGTATTTACGGTAAACTGCCCACTTGGCAGTACATCAAG TGTATCATATGCCAAGTACGCCCCCTATTGACGTCAATGACGGTAAATG GCCCGCCTGGCATTATGCCCAGTACATGACCTTATGGGACTTTCCTACT TGGCAGTACATCTACGTATTAGTCATCGCTATTACCATGGTCGAGGTGA GCCCCACGTTCTGCTTCACTCTCCCCATCTCCCCCCCCTCCCCACCCC CAATTTTGTATTTATTTATTTTTTAATTATTTTGTGCAGCGATGGGGGCG GGGGGGGGGGGGGGGCGCGCGCCAGGCGGGGCGGGGCGGGGCGA GGGGCGGGGCGGGGCGAGGCGGAGAGGTGCGGCGGCAGCCAATCA GAGCGGCGCGCTCCGAAAGTTTCCTTTTATGGCGAGGCGGCGGCGGC GGCGGCCCTATAAAAAGCGAAGCGCGCGGCGGGCGGGAGTCGCTGC GCGCTGCCTTCGCCCCGTGCCCCGCTCCGCCGCCGCCTCGCGCCGCC CGCCCCGGCTCTGACTGACCGCGTTACTCCCACAGGTGAGCGGGCGG GACGGCCCTTCTCCTCCGGGCTGTAATTAGCGCTTGGTTTAATGACGG CTTGTTTCTTTTCTGTGGCTGCGTGAAAGCCTTGAGGGGCTCCGGGAG GGCCCTTTGTGCGGGGGGAGCGGCTCGGGGGGTGCGTGCGTGTGTG TGTGCGTGGGGAGCGCCGCGTGCGGCTCCGCGCTGCCCGGCGGCTG TGAGCGCTGCGGGCGCGGCGCGGGGCTTTGTGCGCTCCGCAGTGTGC GCGAGGGGAGCGCGGCCGGGGGCGGTGCCCCGCGGTGCGGGGGGG GCTGCGAGGGGAACAAAGGCTGCGTGCGGGGTGTGTGCGTGGGGGG GTGAGCAGGGGGTGTGGGCGCGTCGGTCGGGCTGCAACCCCCCCTG | 143 |
| | CACCCCCCTCCCCGAGTTGCTGAGCACGGCCCGGCTTCGGGTGCGGG | |
| | GCTCCGTACGGGGCGTGGCGCGGGGCTCGCCGTGCCGGGCGGGGGG | |
| | TGGCGGCAGGTGGGGGTGCCGGGCGGGGCGGGGCCGCCTCGGGCC | |
| | GGGGAGGGCTCGGGGGAGGGGCGCGGCGGCCCCCGGAGCGCCGGC | |
| | GGCTGTCGAGGCGCGGCGAGCCGCAGCCATTGCCTTTTATGGTAATCG | |
| | TGCGAGAGGGCGCAGGGACTTCCTTTGTCCCAAATCTGTGCGGAGCCG | |
| | AAATCTGGGAGGCGCCGCCGCACCCCCTCTAGCGGGCGCGGGGCGAA | |
| | GCGGTGCGGCGCCGGCAGGAAGGAAATGGGCGGGGAGGGCCTTCGT | |
| | GCGTCGCCGCGCCGCCGTCCCCTTCTCCCTCTCCAGCCTCGGGGCTG | |
| | TCCGCGGGGGGACGGCTGCCTTCGGGGGGGACGGGGCAGGGCGGG | |
| | GTTCGGCTTCTGGCGTGTGACCGGCGGCTCTAGAGCCTCTGCTAACCA | |
| | TGTTCATGCCTTCTTCTTTTTCCTACAGCTCCTGGGCAACGTGCTGGTT | |
| | ATTGTGCTGTCTCATCATTTTGGCAAAGAATTGGAGAATAAACTAGTATT | |
| | CTTCTGGTCCCCACAGACTCAGAGAGAACCCGCCACCATGTTCGTGTT | |
| | CCTGGTGCTGCTGCCCCTGGTGAGCAGCCAGTGCGTGAACCTGACCA | |
| | CCAGGACCCAGCTGCCCCCCGCCTACACCAACAGCTTCACCAGGGGC | |
| | GTGTACTACCCCGACAAGGTGTTCAGGAGCAGCGTGCTGCACAGCACC | |
| | CAGGACCTGTTCCTGCCCTTCTTCAGCAACGTGACCTGGTTCCACGCC | |
| | ATCCACGTGAGCGGCACCAACGGCACCAAGAGGTTCGACAACCCCGT | |
| | GCTGCCCTTCAACGACGGCGTGTACTTCGCCAGCACCGAGAAGAGCAA | |
| | CATCATCAGGGGCTGGATCTTCGGCACCACCCTGGACAGCAAGACCCA | |
| | GAGCCTGCTGATCGTGAACAACGCCACCAACGTGGTGATCAAGGTGTG | |
| | CGAGTTCCAGTTCTGCAACGACCCCTTCCTGGGCGTGTACTACCACAA | |
| | GAACAACAAGAGCTGGATGGAGAGCGAGTTCAGGGTGTACAGCAGCG | |
| | CCAACAACTGCACCTTCGAGTACGTGAGCCAGCCCTTCCTGATGGACC | |
| | TGGAGGGCAAGCAGGGCAACTTCAAGAACCTGAGGGAGTTCGTGTTCA | |
| | AGAACATCGACGGCTACTTCAAGATCTACAGCAAGCACACCCCCATCAA | |
| | CCTGGTGAGGGACCTGCCCCAGGGCTTCAGCGCCCTGGAGCCCCTGG | |
| | TGGACCTGCCCATCGGCATCAACATCACCAGGTTCCAGACCCTGCTGG | |
| | CCCTGCACAGGAGCTACCTGACCCCCGGCGACAGCAGCAGCGGCTGG | |
| | ACCGCCGGCGCCGCCGCCTACTACGTGGGCTACCTGCAGCCCAGGAC | |
| | CTTCCTGCTGAAGTACAACGAGAACGGCACCATCACCGACGCCGTGGA | |
| | CTGCGCCCTGGACCCCCTGAGCGAGACCAAGTGCACCCTGAAGAGCTT | |
| | CACCGTGGAGAAGGGCATCTACCAGACCAGCAACTTCAGGGTGCAGCC | |
| | CACCGAGAGCATCGTGAGGTTCCCCAACATCACCAACCTGTGCCCCTT | |
| | CGGCGAGGTGTTCAACGCCACCAGGTTCGCCAGCGTGTACGCCTGGA | |
| | ACAGGAAGAGGATCAGCAACTGCGTGGCCGACTACAGCGTGCTGTACA | |
| | ACAGCGCCAGCTTCAGCACCTTCAAGTGCTACGGCGTGAGCCCCACCA | |
| | AGCTGAACGACCTGTGCTTCACCAACGTGTACGCCGACAGCTTCGTGA | |
| | TCAGGGGCGACGAGGTGAGGCAGATCGCCCCCGGCCAGACCGGCAA | |
| | GATCGCCGACTACAACTACAAGCTGCCCGACGACTTCACCGGCTGCGT | |
| | GATCGCCTGGAACAGCAACAACCTGGACAGCAAGGTGGGCGGCAACT | |
| | ACAACTACCTGTACAGGCTGTTCAGGAAGAGCAACCTGAAGCCCTTCG | |
| | AGAGGGACATCAGCACCGAGATCTACCAGGCCGGCAGCACCCCCTGC | |
| | AACGGCGTGGAGGGCTTCAACTGCTACTTCCCCCTGCAGAGCTACGGC | |
| | TTCCAGCCCACCAACGGCGTGGGCTACCAGCCCTACAGGGTGGTGGT | |
| | GCTGAGCTTCGAGCTGCTGCACGCCCCCGCCACCGTGTGCGGCCCCA | |
| | AGAAGAGCACCAACCTGGTGAAGAACAAGTGCGTGAACTTCAACTTCAA | |
| | CGGCCTGACCGGCACCGGCGTGCTGACCGAGAGCAACAAGAAGTTCC | |
| | TGCCCTTCCAGCAGTTCGGCAGGGACATCGCCGACACCACCGACGCC | |
| | GTGAGGGACCCCCAGACCCTGGAGATCCTGGACATCACCCCCTGCAG | |
| | CTTCGGCGGCGTGAGCGTGATCACCCCCGGCACCAACACCAGCAACC | |
| | AGGTGGCCGTGCTGTACCAGGACGTGAACTGCACCGAGGTGCCCGTG | |
| | GCCATCCACGCCGACCAGCTGACCCCCACCTGGAGGGTGTACAGCAC | |
| | CGGCAGCAACGTGTTCCAGACCAGGGCCGGCTGCCTGATCGGCGCCG | |
| | AGCACGTGAACAACAGCTACGAGTGCGACATCCCCATCGGCGCCGGC | |
| | ATCTGCGCCAGCTACCAGACCCAGACCAACAGCCCCGGCAGCGCCAG | |
| | CAGCGTGGCCAGCCAGAGCATCATCGCCTACACCATGAGCCTGGGCG | |
| | CCGAGAACAGCGTGGCCTACAGCAACAACAGCATCGCCATCCCCACCA | |
| | ACTTCACCATCAGCGTGACCACCGAGATCCTGCCCGTGAGCATGACCA | |
| | AGACCAGCGTGGACTGCACCATGTACATCTGCGGCGACAGCACCGAGT | |
| | GCAGCAACCTGCTGCTGCAGTACGGCAGCTTCTGCACCCAGCTGAACA | |
| | GGGCCCTGACCGGCATCGCCGTGGAGCAGGACAAGAACACCCAGGAG | |
| | GTGTTCGCCCAGGTGAAGCAGATCTACAAGACCCCCCCCATCAAGGAC | |
| | TTCGGCGGCTTCAACTTCAGCCAGATCCTGCCCGACCCCAGCAAGCCC | |
| | AGCAAGAGGAGCCCCATCGAGGACCTGCTGTTCAACAAGGTGACCCTG | |
| | GCCGACGCCGGCTTCATCAAGCAGTACGGCGACTGCCTGGGCGACAT | |
| | CGCCGCCAGGGACCTGATCTGCGCCCAGAAGTTCAACGGCCTGACCG | |
| | TGCTGCCCCCCCTGCTGACCGACGAGATGATCGCCCAGTACACCAGCG | |
| | CCCTGCTGGCCGGCACCATCACCAGCGGCTGGACCTTCGGCGCCGGC | |
| | CCCGCCCTGCAGATCCCCTTCCCCATGCAGATGGCCTACAGGTTCAAC | |
| | GGCATCGGCGTGACCCAGAACGTGCTGTACGAGAACCAGAAGCTGATC | |
| | GCCAACCAGTTCAACAGCGCCATCGGCAAGATCCAGGACAGCCTGAGC | |
| | AGCACCCCCAGCGCCCTGGGCAAGCTGCAGGACGTGGTGAACCAGAA | |
| | CGCCCAGGCCCTGAACACCCTGGTGAAGCAGCTGAGCAGCAACTTCG | |
| | GCGCCATCAGCAGCGTGCTGAACGACATCCTGAGCAGGCTGGACCCC | |
| | CCCGAGGCCGAGGTGCAGATCGACAGGCTGATCACCGGCAGGCTGCA | |
| | GAGCCTGCAGACCTACGTGACCCAGCAGCTGATCAGGGCCGCCGAGA | |
| | TCAGGGCCAGCGCCAACCTGGCCGCCACCAAGATGAGCGAGTGCGTG | |
| | CTGGGCCAGAGCAAGAGGGTGGACTTCTGCGGCAAGGGCTACCACCT | |
| | GATGAGCTTCCCCCAGAGCGCCCCCCACGGCGTGGTGTTCCTGCACG | |
| | TGACCTACGTGCCCGCCCAGGAGAAGAACTTCACCACCGCCCCCGCCA | |
| | TCTGCCACGACGGCAAGGCCCACTTCCCCAGGGAGGGCGTGTTCGTG | |
| | AGCAACGGCACCCACTGGTTCGTGACCCAGAGGAACTTCTACGAGCCC | |
| | CAGATCATCACCACCGACAACACCTTCGTGAGCGGCAACTGCGACGTG | |
| | GTGATCGGCATCGTGAACAACACCGTGTACGACCCCCTGCAGCCCGAG | |
| | CTGGACAGCTTCAAGGAGGAGCTGGACAAGTACTTCAAGAACCACACC | |
| | AGCCCCGACGTGGACCTGGGCGACATCAGCGGCATCAACGCCAGCGT | |
| | GGTGAACATCCAGAAGGAGATCGACAGGCTGAACGAGGTGGCCAAGA | |
| | ACCTGAACGAGAGCCTGATCGACCTGCAGGAGCTGGGCAAGTACGAG | |
| | CAGTACATCAAGTGGCCCTGGTACATCTGGCTGGGCTTCATCGCCGGC | |
| | CTGATCGCCATCGTGATGGTGACCATCATGCTGTGCTGCATGACCAGC | |
| | TGCTGCAGCTGCCTGAAGGGCTGCTGCAGCTGCGGCAGCTGCTGCAA | |
| | GTTCGACGAGGACGACAGCGAGCCCGTGCTGAAGGGCGTGAAGCTGC | |
| | ACTACACCGGAAGCGGAGCCACGAACTTCTCTCTGTTAAAGCAAGCAG | |
| | [chemical structure] | |
| | [chemical structure] | |
| | AGCCACGAACTTCTCTCTGTTAAAGCAAGCAGGAGATGTTGAAGAAAAC | |
| | [chemical structure] | |
| | GGAGCCACGAACTTCTCTCTGTTAAAGCAAGCAGGAGATGTTGAAGAAA | |
| | [chemical structure] | |
| | [chemical structure] | |
| | [chemical structure] | |
| | [chemical structure] | |
| [chemical structure] | CTCGACATTGATTATTGACTAGTTATTAATAGTAATCAATTACGGGGTCA TTAGTTCATAGCCCATATATGGAGTTCCGCGTTACATAACTTACGGTAAA TGGCCCGCCTGGCTGACCGCCCAACGACCCCCGCCCATTGACGTCAAT AATGACGTATGTTCCCATAGTAACGCCAATAGGGACTTTCCATTGACGT CAATGGGTGGAGTATTTACGGTAAACTGCCCACTTGGCAGTACATCAAG TGTATCATATGCCAAGTACGCCCCCTATTGACGTCAATGACGGTAAATG GCCCGCCTGGCATTATGCCCAGTACATGACCTTATGGGACTTTCCTACT TGGCAGTACATCTACGTATTAGTCATCGCTATTACCATGGTCGAGGTGA GCCCCACGTTCTGCTTCACTCTCCCCATCTCCCCCCCCTCCCCACCCC CAATTTTGTATTTATTTATTTTTTAATTATTTTGTGCAGCGATGGGGGCG GGGGGGGGGGGGGGGCGCGCGCCAGGCGGGGCGGGGCGGGGCGA GGGGCGGGGCGGGGCGAGGCGGAGAGGTGCGGCGGCAGCCAATCA GAGCGGCGCGCTCCGAAAGTTTCCTTTTATGGCGAGGCGGCGGCGGC GGCGGCCCTATAAAAAGCGAAGCGCGCGGCGGGCGGGAGTCGCTGC GCGCTGCCTTCGCCCCGTGCCCCGCTCCGCCGCCGCCTCGCGCCGCC CGCCCCGGCTCTGACTGACCGCGTTACTCCCACAGGTGAGCGGGCGG GACGGCCCTTCTCCTCCGGGCTGTAATTAGCGCTTGGTTTAATGACGG CTTGTTTCTTTTCTGTGGCTGCGTGAAAGCCTTGAGGGGCTCCGGGAG GGCCCTTTGTGCGGGGGGAGCGGCTCGGGGGGTGCGTGCGTGTGTG TGTGCGTGGGGAGCGCCGCGTGCGGCTCCGCGCTGCCCGGCGGCTG TGAGCGCTGCGGGCGCGGCGCGGGGCTTTGTGCGCTCCGCAGTGTGC | 144 |
| | GCGAGGGGAGCGCGGCCGGGGGCGGTGCCCCGCGGTGCGGGGGGG | |
| | GCTGCGAGGGGAACAAAGGCTGCGTGCGGGGTGTGTGCGTGGGGGG | |
| | GTGAGCAGGGGGTGTGGGCGCGTCGGTCGGGCTGCAACCCCCCCTG | |
| | CACCCCCCTCCCCGAGTTGCTGAGCACGGCCCGGCTTCGGGTGCGGG | |
| | GCTCCGTACGGGGCGTGGCGCGGGGCTCGCCGTGCCGGGCGGGGGG | |
| | TGGCGGCAGGTGGGGGTGCCGGGCGGGGCGGGGCCGCCTCGGGCC | |
| | GGGGAGGGCTCGGGGGAGGGGCGCGGCGGCCCCCGGAGCGCCGGC | |
| | GGCTGTCGAGGCGCGGCGAGCCGCAGCCATTGCCTTTTATGGTAATCG | |
| | TGCGAGAGGGCGCAGGGACTTCCTTTGTCCCAAATCTGTGCGGAGCCG | |
| | AAATCTGGGAGGCGCCGCCGCACCCCCTCTAGCGGGCGCGGGGCGAA | |
| | GCGGTGCGGCGCCGGCAGGAAGGAAATGGGCGGGGAGGGCCTTCGT | |
| | GCGTCGCCGCGCCGCCGTCCCCTTCTCCCTCTCCAGCCTCGGGGCTG | |
| | TCCGCGGGGGGACGGCTGCCTTCGGGGGGGACGGGGCAGGGCGGG | |
| | GTTCGGCTTCTGGCGTGTGACCGGCGGCTCTAGAGCCTCTGCTAACCA | |
| | TGTTCATGCCTTCTTCTTTTTCCTACAGCTCCTGGGCAACGTGCTGGTT | |
| | ATTGTGCTGTCTCATCATTTTGGCAAAGAATTGGAGAATAAACTAGTATT | |
| | CTTCTGGTCCCCACAGACTCAGAGAGAACCCGCCACCATGTTCGTGTT | |
| | CCTGGTGCTGCTGCCCCTGGTGAGCAGCCAGTGCGTGAACCTGACCA | |
| | CCAGGACCCAGCTGCCCCCCGCCTACACCAACAGCTTCACCAGGGGC | |
| | GTGTACTACCCCGACAAGGTGTTCAGGAGCAGCGTGCTGCACAGCACC | |
| | CAGGACCTGTTCCTGCCCTTCTTCAGCAACGTGACCTGGTTCCACGCC | |
| | ATCCACGTGAGCGGCACCAACGGCACCAAGAGGTTCGACAACCCCGT | |
| | GCTGCCCTTCAACGACGGCGTGTACTTCGCCAGCACCGAGAAGAGCAA | |
| | CATCATCAGGGGCTGGATCTTCGGCACCACCCTGGACAGCAAGACCCA | |
| | GAGCCTGCTGATCGTGAACAACGCCACCAACGTGGTGATCAAGGTGTG | |
| | CGAGTTCCAGTTCTGCAACGACCCCTTCCTGGGCGTGTACTACCACAA | |
| | GAACAACAAGAGCTGGATGGAGAGCGAGTTCAGGGTGTACAGCAGCG | |
| | CCAACAACTGCACCTTCGAGTACGTGAGCCAGCCCTTCCTGATGGACC | |
| | TGGAGGGCAAGCAGGGCAACTTCAAGAACCTGAGGGAGTTCGTGTTCA | |
| | AGAACATCGACGGCTACTTCAAGATCTACAGCAAGCACACCCCCATCAA | |
| | CCTGGTGAGGGACCTGCCCCAGGGCTTCAGCGCCCTGGAGCCCCTGG | |
| | TGGACCTGCCCATCGGCATCAACATCACCAGGTTCCAGACCCTGCTGG | |
| | CCCTGCACAGGAGCTACCTGACCCCCGGCGACAGCAGCAGCGGCTGG | |
| | ACCGCCGGCGCCGCCGCCTACTACGTGGGCTACCTGCAGCCCAGGAC | |
| | CTTCCTGCTGAAGTACAACGAGAACGGCACCATCACCGACGCCGTGGA | |
| | CTGCGCCCTGGACCCCCTGAGCGAGACCAAGTGCACCCTGAAGAGCTT | |
| | CACCGTGGAGAAGGGCATCTACCAGACCAGCAACTTCAGGGTGCAGCC | |
| | CACCGAGAGCATCGTGAGGTTCCCCAACATCACCAACCTGTGCCCCTT | |
| | CGGCGAGGTGTTCAACGCCACCAGGTTCGCCAGCGTGTACGCCTGGA | |
| | ACAGGAAGAGGATCAGCAACTGCGTGGCCGACTACAGCGTGCTGTACA | |
| | ACAGCGCCAGCTTCAGCACCTTCAAGTGCTACGGCGTGAGCCCCACCA | |
| | AGCTGAACGACCTGTGCTTCACCAACGTGTACGCCGACAGCTTCGTGA | |
| | TCAGGGGCGACGAGGTGAGGCAGATCGCCCCCGGCCAGACCGGCAA | |
| | GATCGCCGACTACAACTACAAGCTGCCCGACGACTTCACCGGCTGCGT | |
| | GATCGCCTGGAACAGCAACAACCTGGACAGCAAGGTGGGCGGCAACT | |
| | ACAACTACCTGTACAGGCTGTTCAGGAAGAGCAACCTGAAGCCCTTCG | |
| | AGAGGGACATCAGCACCGAGATCTACCAGGCCGGCAGCACCCCCTGC | |
| | AACGGCGTGGAGGGCTTCAACTGCTACTTCCCCCTGCAGAGCTACGGC | |
| | TTCCAGCCCACCAACGGCGTGGGCTACCAGCCCTACAGGGTGGTGGT | |
| | GCTGAGCTTCGAGCTGCTGCACGCCCCCGCCACCGTGTGCGGCCCCA | |
| | AGAAGAGCACCAACCTGGTGAAGAACAAGTGCGTGAACTTCAACTTCAA | |
| | CGGCCTGACCGGCACCGGCGTGCTGACCGAGAGCAACAAGAAGTTCC | |
| | TGCCCTTCCAGCAGTTCGGCAGGGACATCGCCGACACCACCGACGCC | |
| | GTGAGGGACCCCCAGACCCTGGAGATCCTGGACATCACCCCCTGCAG | |
| | CTTCGGCGGCGTGAGCGTGATCACCCCCGGCACCAACACCAGCAACC | |
| | AGGTGGCCGTGCTGTACCAGGACGTGAACTGCACCGAGGTGCCCGTG | |
| | GCCATCCACGCCGACCAGCTGACCCCCACCTGGAGGGTGTACAGCAC | |
| | CGGCAGCAACGTGTTCCAGACCAGGGCCGGCTGCCTGATCGGCGCCG | |
| | AGCACGTGAACAACAGCTACGAGTGCGACATCCCCATCGGCGCCGGC | |
| | ATCTGCGCCAGCTACCAGACCCAGACCAACAGCCCCGGCAGCGCCAG | |
| | CAGCGTGGCCAGCCAGAGCATCATCGCCTACACCATGAGCCTGGGCG | |
| | CCGAGAACAGCGTGGCCTACAGCAACAACAGCATCGCCATCCCCACCA | |
| | ACTTCACCATCAGCGTGACCACCGAGATCCTGCCCGTGAGCATGACCA | |
| | AGACCAGCGTGGACTGCACCATGTACATCTGCGGCGACAGCACCGAGT | |
| | GCAGCAACCTGCTGCTGCAGTACGGCAGCTTCTGCACCCAGCTGAACA | |
| | GGGCCCTGACCGGCATCGCCGTGGAGCAGGACAAGAACACCCAGGAG | |
| | GTGTTCGCCCAGGTGAAGCAGATCTACAAGACCCCCCCCATCAAGGAC | |
| | TTCGGCGGCTTCAACTTCAGCCAGATCCTGCCCGACCCCAGCAAGCCC | |
| | AGCAAGAGGAGCCCCATCGAGGACCTGCTGTTCAACAAGGTGACCCTG | |
| | GCCGACGCCGGCTTCATCAAGCAGTACGGCGACTGCCTGGGCGACAT | |
| | CGCCGCCAGGGACCTGATCTGCGCCCAGAAGTTCAACGGCCTGACCG | |
| | TGCTGCCCCCCCTGCTGACCGACGAGATGATCGCCCAGTACACCAGCG | |
| | CCCTGCTGGCCGGCACCATCACCAGCGGCTGGACCTTCGGCGCCGGC | |
| | CCCGCCCTGCAGATCCCCTTCCCCATGCAGATGGCCTACAGGTTCAAC | |
| | GGCATCGGCGTGACCCAGAACGTGCTGTACGAGAACCAGAAGCTGATC | |
| | GCCAACCAGTTCAACAGCGCCATCGGCAAGATCCAGGACAGCCTGAGC | |
| | AGCACCCCCAGCGCCCTGGGCAAGCTGCAGGACGTGGTGAACCAGAA | |
| | CGCCCAGGCCCTGAACACCCTGGTGAAGCAGCTGAGCAGCAACTTCG | |
| | GCGCCATCAGCAGCGTGCTGAACGACATCCTGAGCAGGCTGGACCCC | |
| | CCCGAGGCCGAGGTGCAGATCGACAGGCTGATCACCGGCAGGCTGCA | |
| | GAGCCTGCAGACCTACGTGACCCAGCAGCTGATCAGGGCCGCCGAGA | |
| | TCAGGGCCAGCGCCAACCTGGCCGCCACCAAGATGAGCGAGTGCGTG | |
| | CTGGGCCAGAGCAAGAGGGTGGACTTCTGCGGCAAGGGCTACCACCT | |
| | GATGAGCTTCCCCCAGAGCGCCCCCCACGGCGTGGTGTTCCTGCACG | |
| | TGACCTACGTGCCCGCCCAGGAGAAGAACTTCACCACCGCCCCCGCCA | |
| | TCTGCCACGACGGCAAGGCCCACTTCCCCAGGGAGGGCGTGTTCGTG | |
| | AGCAACGGCACCCACTGGTTCGTGACCCAGAGGAACTTCTACGAGCCC | |
| | CAGATCATCACCACCGACAACACCTTCGTGAGCGGCAACTGCGACGTG | |
| | GTGATCGGCATCGTGAACAACACCGTGTACGACCCCCTGCAGCCCGAG | |
| | CTGGACAGCTTCAAGGAGGAGCTGGACAAGTACTTCAAGAACCACACC | |
| | AGCCCCGACGTGGACCTGGGCGACATCAGCGGCATCAACGCCAGCGT | |
| | GGTGAACATCCAGAAGGAGATCGACAGGCTGAACGAGGTGGCCAAGA | |
| | ACCTGAACGAGAGCCTGATCGACCTGCAGGAGCTGGGCAAGTACGAG | |
| | CAGTACATCAAGTGGCCCTGGTACATCTGGCTGGGCTTCATCGCCGGC | |
| | CTGATCGCCATCGTGATGGTGACCATCATGCTGTGCTGCATGACCAGC | |
| | TGCTGCAGCTGCCTGAAGGGCTGCTGCAGCTGCGGCAGCTGCTGCAA | |
| | GTTCGACGAGGACGACAGCGAGCCCGTGCTGAAGGGCGTGAAGCTGC | |
| | ACTACACCGGAAGCGGAGCCACGAACTTCTCTCTGTTAAAGCAAGCAG | |
| | [chemical structure] | |
| | [chemical structure] | |
| | [chemical structure] | |
| | [chemical structure] | |
| | [chemical structure] | |
| [chemical structure] | CTCGACATTGATTATTGACTAGTTATTAATAGTAATCAATTACGGGGTCA TTAGTTCATAGCCCATATATGGAGTTCCGCGTTACATAACTTACGGTAAA TGGCCCGCCTGGCTGACCGCCCAACGACCCCCGCCCATTGACGTCAAT AATGACGTATGTTCCCATAGTAACGCCAATAGGGACTTTCCATTGACGT CAATGGGTGGAGTATTTACGGTAAACTGCCCACTTGGCAGTACATCAAG TGTATCATATGCCAAGTACGCCCCCTATTGACGTCAATGACGGTAAATG GCCCGCCTGGCATTATGCCCAGTACATGACCTTATGGGACTTTCCTACT TGGCAGTACATCTACGTATTAGTCATCGCTATTACCATGGTCGAGGTGA GCCCCACGTTCTGCTTCACTCTCCCCATCTCCCCCCCCTCCCCACCCC CAATTTTGTATTTATTTATTTTTTAATTATTTTGTGCAGCGATGGGGGCG GGGGGGGGGGGGGGGCGCGCGCCAGGCGGGGCGGGGCGGGGCGA GGGGCGGGGCGGGGCGAGGCGGAGAGGTGCGGCGGCAGCCAATCA GAGCGGCGCGCTCCGAAAGTTTCCTTTTATGGCGAGGCGGCGGCGGC GGCGGCCCTATAAAAAGCGAAGCGCGCGGCGGGCGGGAGTCGCTGC GCGCTGCCTTCGCCCCGTGCCCCGCTCCGCCGCCGCCTCGCGCCGCC CGCCCCGGCTCTGACTGACCGCGTTACTCCCACAGGTGAGCGGGCGG GACGGCCCTTCTCCTCCGGGCTGTAATTAGCGCTTGGTTTAATGACGG CTTGTTTCTTTTCTGTGGCTGCGTGAAAGCCTTGAGGGGCTCCGGGAG GGCCCTTTGTGCGGGGGGAGCGGCTCGGGGGGTGCGTGCGTGTGTG TGTGCGTGGGGAGCGCCGCGTGCGGCTCCGCGCTGCCCGGCGGCTG TGAGCGCTGCGGGCGCGGCGCGGGGCTTTGTGCGCTCCGCAGTGTGC | 145 |
| | GCGAGGGGAGCGCGGCCGGGGGCGGTGCCCCGCGGTGCGGGGGGG | |
| | GCTGCGAGGGGAACAAAGGCTGCGTGCGGGGTGTGTGCGTGGGGGG | |
| | GTGAGCAGGGGGTGTGGGCGCGTCGGTCGGGCTGCAACCCCCCCTG | |
| | CACCCCCCTCCCCGAGTTGCTGAGCACGGCCCGGCTTCGGGTGCGGG | |
| | GCTCCGTACGGGGCGTGGCGCGGGGCTCGCCGTGCCGGGCGGGGGG | |
| | TGGCGGCAGGTGGGGGTGCCGGGCGGGGCGGGGCCGCCTCGGGCC | |
| | GGGGAGGGCTCGGGGGAGGGGCGCGGCGGCCCCCGGAGCGCCGGC | |
| | GGCTGTCGAGGCGCGGCGAGCCGCAGCCATTGCCTTTTATGGTAATCG | |
| | TGCGAGAGGGCGCAGGGACTTCCTTTGTCCCAAATCTGTGCGGAGCCG | |
| | AAATCTGGGAGGCGCCGCCGCACCCCCTCTAGCGGGCGCGGGGCGAA | |
| | GCGGTGCGGCGCCGGCAGGAAGGAAATGGGCGGGGAGGGCCTTCGT | |
| | GCGTCGCCGCGCCGCCGTCCCCTTCTCCCTCTCCAGCCTCGGGGCTG | |
| | TCCGCGGGGGGACGGCTGCCTTCGGGGGGGACGGGGCAGGGCGGG | |
| | GTTCGGCTTCTGGCGTGTGACCGGCGGCTCTAGAGCCTCTGCTAACCA | |
| | TGTTCATGCCTTCTTCTTTTTCCTACAGCTCCTGGGCAACGTGCTGGTT | |
| | ATTGTGCTGTCTCATCATTTTGGCAAAGAATTGGAGAATAAACTAGTATT | |
| | CTTCTGGTCCCCACAGACTCAGAGAGAACCCGCCACCATGTTCGTGTT | |
| | CCTGGTGCTGCTGCCCCTGGTGAGCAGCCAGTGCGTGAACCTGACCA | |
| | CCAGGACCCAGCTGCCCCCCGCCTACACCAACAGCTTCACCAGGGGC | |
| | GTGTACTACCCCGACAAGGTGTTCAGGAGCAGCGTGCTGCACAGCACC | |
| | CAGGACCTGTTCCTGCCCTTCTTCAGCAACGTGACCTGGTTCCACGCC | |
| | ATCCACGTGAGCGGCACCAACGGCACCAAGAGGTTCGACAACCCCGT | |
| | GCTGCCCTTCAACGACGGCGTGTACTTCGCCAGCACCGAGAAGAGCAA | |
| | CATCATCAGGGGCTGGATCTTCGGCACCACCCTGGACAGCAAGACCCA | |
| | GAGCCTGCTGATCGTGAACAACGCCACCAACGTGGTGATCAAGGTGTG | |
| | CGAGTTCCAGTTCTGCAACGACCCCTTCCTGGGCGTGTACTACCACAA | |
| | GAACAACAAGAGCTGGATGGAGAGCGAGTTCAGGGTGTACAGCAGCG | |
| | CCAACAACTGCACCTTCGAGTACGTGAGCCAGCCCTTCCTGATGGACC | |
| | TGGAGGGCAAGCAGGGCAACTTCAAGAACCTGAGGGAGTTCGTGTTCA | |
| | AGAACATCGACGGCTACTTCAAGATCTACAGCAAGCACACCCCCATCAA | |
| | CCTGGTGAGGGACCTGCCCCAGGGCTTCAGCGCCCTGGAGCCCCTGG | |
| | TGGACCTGCCCATCGGCATCAACATCACCAGGTTCCAGACCCTGCTGG | |
| | CCCTGCACAGGAGCTACCTGACCCCCGGCGACAGCAGCAGCGGCTGG | |
| | ACCGCCGGCGCCGCCGCCTACTACGTGGGCTACCTGCAGCCCAGGAC | |
| | CTTCCTGCTGAAGTACAACGAGAACGGCACCATCACCGACGCCGTGGA | |
| | CTGCGCCCTGGACCCCCTGAGCGAGACCAAGTGCACCCTGAAGAGCTT | |
| | CACCGTGGAGAAGGGCATCTACCAGACCAGCAACTTCAGGGTGCAGCC | |
| | CACCGAGAGCATCGTGAGGTTCCCCAACATCACCAACCTGTGCCCCTT | |
| | CGGCGAGGTGTTCAACGCCACCAGGTTCGCCAGCGTGTACGCCTGGA | |
| | ACAGGAAGAGGATCAGCAACTGCGTGGCCGACTACAGCGTGCTGTACA | |
| | ACAGCGCCAGCTTCAGCACCTTCAAGTGCTACGGCGTGAGCCCCACCA | |
| | AGCTGAACGACCTGTGCTTCACCAACGTGTACGCCGACAGCTTCGTGA | |
| | TCAGGGGCGACGAGGTGAGGCAGATCGCCCCCGGCCAGACCGGCAA | |
| | GATCGCCGACTACAACTACAAGCTGCCCGACGACTTCACCGGCTGCGT | |
| | GATCGCCTGGAACAGCAACAACCTGGACAGCAAGGTGGGCGGCAACT | |
| | ACAACTACCTGTACAGGCTGTTCAGGAAGAGCAACCTGAAGCCCTTCG | |
| | AGAGGGACATCAGCACCGAGATCTACCAGGCCGGCAGCACCCCCTGC | |
| | AACGGCGTGGAGGGCTTCAACTGCTACTTCCCCCTGCAGAGCTACGGC | |
| | TTCCAGCCCACCAACGGCGTGGGCTACCAGCCCTACAGGGTGGTGGT | |
| | GCTGAGCTTCGAGCTGCTGCACGCCCCCGCCACCGTGTGCGGCCCCA | |
| | AGAAGAGCACCAACCTGGTGAAGAACAAGTGCGTGAACTTCAACTTCAA | |
| | CGGCCTGACCGGCACCGGCGTGCTGACCGAGAGCAACAAGAAGTTCC | |
| | TGCCCTTCCAGCAGTTCGGCAGGGACATCGCCGACACCACCGACGCC | |
| | GTGAGGGACCCCCAGACCCTGGAGATCCTGGACATCACCCCCTGCAG | |
| | CTTCGGCGGCGTGAGCGTGATCACCCCCGGCACCAACACCAGCAACC | |
| | AGGTGGCCGTGCTGTACCAGGACGTGAACTGCACCGAGGTGCCCGTG | |
| | GCCATCCACGCCGACCAGCTGACCCCCACCTGGAGGGTGTACAGCAC | |
| | CGGCAGCAACGTGTTCCAGACCAGGGCCGGCTGCCTGATCGGCGCCG | |
| | AGCACGTGAACAACAGCTACGAGTGCGACATCCCCATCGGCGCCGGC | |
| | ATCTGCGCCAGCTACCAGACCCAGACCAACAGCCCCGGCAGCGCCAG | |
| | CAGCGTGGCCAGCCAGAGCATCATCGCCTACACCATGAGCCTGGGCG | |
| | CCGAGAACAGCGTGGCCTACAGCAACAACAGCATCGCCATCCCCACCA | |
| | ACTTCACCATCAGCGTGACCACCGAGATCCTGCCCGTGAGCATGACCA | |
| | AGACCAGCGTGGACTGCACCATGTACATCTGCGGCGACAGCACCGAGT | |
| | GCAGCAACCTGCTGCTGCAGTACGGCAGCTTCTGCACCCAGCTGAACA | |
| | GGGCCCTGACCGGCATCGCCGTGGAGCAGGACAAGAACACCCAGGAG | |
| | GTGTTCGCCCAGGTGAAGCAGATCTACAAGACCCCCCCCATCAAGGAC | |
| | TTCGGCGGCTTCAACTTCAGCCAGATCCTGCCCGACCCCAGCAAGCCC | |
| | AGCAAGAGGAGCCCCATCGAGGACCTGCTGTTCAACAAGGTGACCCTG | |
| | GCCGACGCCGGCTTCATCAAGCAGTACGGCGACTGCCTGGGCGACAT | |
| | CGCCGCCAGGGACCTGATCTGCGCCCAGAAGTTCAACGGCCTGACCG | |
| | TGCTGCCCCCCCTGCTGACCGACGAGATGATCGCCCAGTACACCAGCG | |
| | CCCTGCTGGCCGGCACCATCACCAGCGGCTGGACCTTCGGCGCCGGC | |
| | CCCGCCCTGCAGATCCCCTTCCCCATGCAGATGGCCTACAGGTTCAAC | |
| | GGCATCGGCGTGACCCAGAACGTGCTGTACGAGAACCAGAAGCTGATC | |
| | GCCAACCAGTTCAACAGCGCCATCGGCAAGATCCAGGACAGCCTGAGC | |
| | AGCACCCCCAGCGCCCTGGGCAAGCTGCAGGACGTGGTGAACCAGAA | |
| | CGCCCAGGCCCTGAACACCCTGGTGAAGCAGCTGAGCAGCAACTTCG | |
| | GCGCCATCAGCAGCGTGCTGAACGACATCCTGAGCAGGCTGGACCCC | |
| | CCCGAGGCCGAGGTGCAGATCGACAGGCTGATCACCGGCAGGCTGCA | |
| | GAGCCTGCAGACCTACGTGACCCAGCAGCTGATCAGGGCCGCCGAGA | |
| | TCAGGGCCAGCGCCAACCTGGCCGCCACCAAGATGAGCGAGTGCGTG | |
| | CTGGGCCAGAGCAAGAGGGTGGACTTCTGCGGCAAGGGCTACCACCT | |
| | GATGAGCTTCCCCCAGAGCGCCCCCCACGGCGTGGTGTTCCTGCACG | |
| | TGACCTACGTGCCCGCCCAGGAGAAGAACTTCACCACCGCCCCCGCCA | |
| | TCTGCCACGACGGCAAGGCCCACTTCCCCAGGGAGGGCGTGTTCGTG | |
| | AGCAACGGCACCCACTGGTTCGTGACCCAGAGGAACTTCTACGAGCCC | |
| | CAGATCATCACCACCGACAACACCTTCGTGAGCGGCAACTGCGACGTG | |
| | GTGATCGGCATCGTGAACAACACCGTGTACGACCCCCTGCAGCCCGAG | |
| | CTGGACAGCTTCAAGGAGGAGCTGGACAAGTACTTCAAGAACCACACC | |
| | AGCCCCGACGTGGACCTGGGCGACATCAGCGGCATCAACGCCAGCGT | |
| | GGTGAACATCCAGAAGGAGATCGACAGGCTGAACGAGGTGGCCAAGA | |
| | ACCTGAACGAGAGCCTGATCGACCTGCAGGAGCTGGGCAAGTACGAG | |
| | CAGTACATCAAGTGGCCCTGGTACATCTGGCTGGGCTTCATCGCCGGC | |
| | CTGATCGCCATCGTGATGGTGACCATCATGCTGTGCTGCATGACCAGC | |
| | TGCTGCAGCTGCCTGAAGGGCTGCTGCAGCTGCGGCAGCTGCTGCAA | |
| | GTTCGACGAGGACGACAGCGAGCCCGTGCTGAAGGGCGTGAAGCTGC | |
| | ACTACACCGGAAGCGGAGCCACGAACTTCTCTCTGTTAAAGCAAGCAG | |
| | [chemical structure] | |
| | [chemical structure] | |
| | [chemical structure] | |
| [chemical structure] | CTCGACATTGATTATTGACTAGTTATTAATAGTAATCAATTACGGGGTCA TTAGTTCATAGCCCATATATGGAGTTCCGCGTTACATAACTTACGGTAAA TGGCCCGCCTGGCTGACCGCCCAACGACCCCCGCCCATTGACGTCAAT AATGACGTATGTTCCCATAGTAACGCCAATAGGGACTTTCCATTGACGT CAATGGGTGGAGTATTTACGGTAAACTGCCCACTTGGCAGTACATCAAG TGTATCATATGCCAAGTACGCCCCCTATTGACGTCAATGACGGTAAATG GCCCGCCTGGCATTATGCCCAGTACATGACCTTATGGGACTTTCCTACT TGGCAGTACATCTACGTATTAGTCATCGCTATTACCATGGTCGAGGTGA GCCCCACGTTCTGCTTCACTCTCCCCATCTCCCCCCCCTCCCCACCCC CAATTTTGTATTTATTTATTTTTTAATTATTTTGTGCAGCGATGGGGGCG GGGGGGGGGGGGGGGCGCGCGCCAGGCGGGGCGGGGCGGGGCGA GGGGCGGGGCGGGGCGAGGCGGAGAGGTGCGGCGGCAGCCAATCA GAGCGGCGCGCTCCGAAAGATTCCTTTTATGGCGAGGCGGCGGCGGC GGCGGCCCTATAAAAAGCGAAGCGCGCGGCGGGCGGGAGTCGCTGC GCGCTGCCTTCGCCCCGTGCCCCGCTCCGCCGCCGCCTCGCGCCGCC CGCCCCGGCTCTGACTGACCGCGTTACTCCCACAGGTGAGCGGGCGG GACGGCCCTTCTCCTCCGGGCTGTAATTAGCGCTTGGTTTAATGACGG CTTGTTTCTTTTCTGTGGCTGCGTGAAAGCCTTGAGGGGCTCCGGGAG GGCCCTTTGTGCGGGGGGAGCGGCTCGGGGGGTGCGTGCGTGTGTG TGTGCGTGGGGAGCGCCGCGTGCGGCTCCGCGCTGCCCGGCGGCTG TGAGCGCTGCGGGCGCGGCGCGGGGCTTTGTGCGCTCCGCAGTGTGC | 146 |
| | GCGAGGGGAGCGCGGCCGGGGGCGGTGCCCCGCGGTGCGGGGGGG | |
| | GCTGCGAGGGGAACAAAGGCTGCGTGCGGGGTGTGTGCGTGGGGGG | |
| | GTGAGCAGGGGGTGTGGGCGCGTCGGTCGGGCTGCAACCCCCCCTG | |
| | CACCCCCCTCCCCGAGTTGCTGAGCACGGCCCGGCTTCGGGTGCGGG | |
| | GCTCCGTACGGGGCGTGGCGCGGGGCTCGCCGTGCCGGGCGGGGGG | |
| | TGGCGGCAGGTGGGGGTGCCGGGCGGGGCGGGGCCGCCTCGGGCC | |
| | GGGGAGGGCTCGGGGGAGGGGCGCGGCGGCCCCCGGAGCGCCGGC | |
| | GGCTGTCGAGGCGCGGCGAGCCGCAGCCATTGCCTTTTATGGTAATCG | |
| | TGCGAGAGGGCGCAGGGACTTCCTTTGTCCCAAATCTGTGCGGAGCCG | |
| | AAATCTGGGAGGCGCCGCCGCACCCCCTCTAGCGGGCGCGGGGCGAA | |
| | GCGGTGCGGCGCCGGCAGGAAGGAAATGGGCGGGGAGGGCCTTCGT | |
| | GCGTCGCCGCGCCGCCGTCCCCTTCTCCCTCTCCAGCCTCGGGGCTG | |
| | TCCGCGGGGGGACGGCTGCCTTCGGGGGGGACGGGGCAGGGCGGG | |
| | GTTCGGCTTCTGGCGTGTGACCGGCGGCTCTAGAGCCTCTGCTAACCA | |
| | TGTTCATGCCTTCTTCTTTTTCCTACAGCTCCTGGGCAACGTGCTGGTT | |
| | ATTGTGCTGTCTCATCATTTTGGCAAAGAATTGGAGAATAAACTAGTATT | |
| | CTTCTGGTCCCCACAGACTCAGAGAGAACCCGCCACCATGTTCGTGTT | |
| | CCTGGTGCTGCTGCCCCTGGTGAGCAGCCAGTGCGTGAACCTGACCA | |
| | CCAGGACCCAGCTGCCCCCCGCCTACACCAACAGCTTCACCAGGGGC | |
| | GTGTACTACCCCGACAAGGTGTTCAGGAGCAGCGTGCTGCACAGCACC | |
| | CAGGACCTGTTCCTGCCCTTCTTCAGCAACGTGACCTGGTTCCACGCC | |
| | ATCCACGTGAGCGGCACCAACGGCACCAAGAGGTTCGACAACCCCGT | |
| | GCTGCCCTTCAACGACGGCGTGTACTTCGCCAGCACCGAGAAGAGCAA | |
| | CATCATCAGGGGCTGGATCTTCGGCACCACCCTGGACAGCAAGACCCA | |
| | GAGCCTGCTGATCGTGAACAACGCCACCAACGTGGTGATCAAGGTGTG | |
| | CGAGTTCCAGTTCTGCAACGACCCCTTCCTGGGCGTGTACTACCACAA | |
| | GAACAACAAGAGCTGGATGGAGAGCGAGTTCAGGGTGTACAGCAGCG | |
| | CCAACAACTGCACCTTCGAGTACGTGAGCCAGCCCTTCCTGATGGACC | |
| | TGGAGGGCAAGCAGGGCAACTTCAAGAACCTGAGGGAGTTCGTGTTCA | |
| | AGAACATCGACGGCTACTTCAAGATCTACAGCAAGCACACCCCCATCAA | |
| | CCTGGTGAGGGACCTGCCCCAGGGCTTCAGCGCCCTGGAGCCCCTGG | |
| | TGGACCTGCCCATCGGCATCAACATCACCAGGTTCCAGACCCTGCTGG | |
| | CCCTGCACAGGAGCTACCTGACCCCCGGCGACAGCAGCAGCGGCTGG | |
| | ACCGCCGGCGCCGCCGCCTACTACGTGGGCTACCTGCAGCCCAGGAC | |
| | CTTCCTGCTGAAGTACAACGAGAACGGCACCATCACCGACGCCGTGGA | |
| | CTGCGCCCTGGACCCCCTGAGCGAGACCAAGTGCACCCTGAAGAGCTT | |
| | CACCGTGGAGAAGGGCATCTACCAGACCAGCAACTTCAGGGTGCAGCC | |
| | CACCGAGAGCATCGTGAGGTTCCCCAACATCACCAACCTGTGCCCCTT | |
| | CGGCGAGGTGTTCAACGCCACCAGGTTCGCCAGCGTGTACGCCTGGA | |
| | ACAGGAAGAGGATCAGCAACTGCGTGGCCGACTACAGCGTGCTGTACA | |
| | ACAGCGCCAGCTTCAGCACCTTCAAGTGCTACGGCGTGAGCCCCACCA | |
| | AGCTGAACGACCTGTGCTTCACCAACGTGTACGCCGACAGCTTCGTGA | |
| | TCAGGGGCGACGAGGTGAGGCAGATCGCCCCCGGCCAGACCGGCAA | |
| | GATCGCCGACTACAACTACAAGCTGCCCGACGACTTCACCGGCTGCGT | |
| | GATCGCCTGGAACAGCAACAACCTGGACAGCAAGGTGGGCGGCAACT | |
| | ACAACTACCTGTACAGGCTGTTCAGGAAGAGCAACCTGAAGCCCTTCG | |
| | AGAGGGACATCAGCACCGAGATCTACCAGGCCGGCAGCACCCCCTGC | |
| | AACGGCGTGGAGGGCTTCAACTGCTACTTCCCCCTGCAGAGCTACGGC | |
| | TTCCAGCCCACCAACGGCGTGGGCTACCAGCCCTACAGGGTGGTGGT | |
| | GCTGAGCTTCGAGCTGCTGCACGCCCCCGCCACCGTGTGCGGCCCCA | |
| | AGAAGAGCACCAACCTGGTGAAGAACAAGTGCGTGAACTTCAACTTCAA | |
| | CGGCCTGACCGGCACCGGCGTGCTGACCGAGAGCAACAAGAAGTTCC | |
| | TGCCCTTCCAGCAGTTCGGCAGGGACATCGCCGACACCACCGACGCC | |
| | GTGAGGGACCCCCAGACCCTGGAGATCCTGGACATCACCCCCTGCAG | |
| | CTTCGGCGGCGTGAGCGTGATCACCCCCGGCACCAACACCAGCAACC | |
| | AGGTGGCCGTGCTGTACCAGGACGTGAACTGCACCGAGGTGCCCGTG | |
| | GCCATCCACGCCGACCAGCTGACCCCCACCTGGAGGGTGTACAGCAC | |
| | CGGCAGCAACGTGTTCCAGACCAGGGCCGGCTGCCTGATCGGCGCCG | |
| | AGCACGTGAACAACAGCTACGAGTGCGACATCCCCATCGGCGCCGGC | |
| | ATCTGCGCCAGCTACCAGACCCAGACCAACAGCCCCGGCAGCGCCAG | |
| | CAGCGTGGCCAGCCAGAGCATCATCGCCTACACCATGAGCCTGGGCG | |
| | CCGAGAACAGCGTGGCCTACAGCAACAACAGCATCGCCATCCCCACCA | |
| | ACTTCACCATCAGCGTGACCACCGAGATCCTGCCCGTGAGCATGACCA | |
| | AGACCAGCGTGGACTGCACCATGTACATCTGCGGCGACAGCACCGAGT | |
| | GCAGCAACCTGCTGCTGCAGTACGGCAGCTTCTGCACCCAGCTGAACA | |
| | GGGCCCTGACCGGCATCGCCGTGGAGCAGGACAAGAACACCCAGGAG | |
| | GTGTTCGCCCAGGTGAAGCAGATCTACAAGACCCCCCCCATCAAGGAC | |
| | TTCGGCGGCTTCAACTTCAGCCAGATCCTGCCCGACCCCAGCAAGCCC | |
| | AGCAAGAGGAGCCCCATCGAGGACCTGCTGTTCAACAAGGTGACCCTG | |
| | GCCGACGCCGGCTTCATCAAGCAGTACGGCGACTGCCTGGGCGACAT | |
| | CGCCGCCAGGGACCTGATCTGCGCCCAGAAGTTCAACGGCCTGACCG | |
| | TGCTGCCCCCCCTGCTGACCGACGAGATGATCGCCCAGTACACCAGCG | |
| | CCCTGCTGGCCGGCACCATCACCAGCGGCTGGACCTTCGGCGCCGGC | |
| | CCCGCCCTGCAGATCCCCTTCCCCATGCAGATGGCCTACAGGTTCAAC | |
| | GGCATCGGCGTGACCCAGAACGTGCTGTACGAGAACCAGAAGCTGATC | |
| | GCCAACCAGTTCAACAGCGCCATCGGCAAGATCCAGGACAGCCTGAGC | |
| | AGCACCCCCAGCGCCCTGGGCAAGCTGCAGGACGTGGTGAACCAGAA | |
| | CGCCCAGGCCCTGAACACCCTGGTGAAGCAGCTGAGCAGCAACTTCG | |
| | GCGCCATCAGCAGCGTGCTGAACGACATCCTGAGCAGGCTGGACCCC | |
| | CCCGAGGCCGAGGTGCAGATCGACAGGCTGATCACCGGCAGGCTGCA | |
| | GAGCCTGCAGACCTACGTGACCCAGCAGCTGATCAGGGCCGCCGAGA | |
| | TCAGGGCCAGCGCCAACCTGGCCGCCACCAAGATGAGCGAGTGCGTG | |
| | CTGGGCCAGAGCAAGAGGGTGGACTTCTGCGGCAAGGGCTACCACCT | |
| | GATGAGCTTCCCCCAGAGCGCCCCCCACGGCGTGGTGTTCCTGCACG | |
| | TGACCTACGTGCCCGCCCAGGAGAAGAACTTCACCACCGCCCCCGCCA | |
| | TCTGCCACGACGGCAAGGCCCACTTCCCCAGGGAGGGCGTGTTCGTG | |
| | AGCAACGGCACCCACTGGTTCGTGACCCAGAGGAACTTCTACGAGCCC | |
| | CAGATCATCACCACCGACAACACCTTCGTGAGCGGCAACTGCGACGTG | |
| | GTGATCGGCATCGTGAACAACACCGTGTACGACCCCCTGCAGCCCGAG | |
| | CTGGACAGCTTCAAGGAGGAGCTGGACAAGTACTTCAAGAACCACACC | |
| | AGCCCCGACGTGGACCTGGGCGACATCAGCGGCATCAACGCCAGCGT | |
| | GGTGAACATCCAGAAGGAGATCGACAGGCTGAACGAGGTGGCCAAGA | |
| | ACCTGAACGAGAGCCTGATCGACCTGCAGGAGCTGGGCAAGTACGAG | |
| | CAGTACATCAAGTGGCCCTGGTACATCTGGCTGGGCTTCATCGCCGGC | |
| | CTGATCGCCATCGTGATGGTGACCATCATGCTGTGCTGCATGACCAGC | |
| | TGCTGCAGCTGCCTGAAGGGCTGCTGCAGCTGCGGCAGCTGCTGCAA | |
| | GTTCGACGAGGACGACAGCGAGCCCGTGCTGAAGGGCGTGAAGCTGC | |
| | ACTACACCGGAAGCGGAGCCACGAACTTCTCTCTGTTAAAGCAAGCAG | |
| | [chemical structure] | |
| | [chemical structure] | |
| | [chemical structure] | |
| | [chemical structure] | |
| | [chemical structure] | |
| | [chemical structure] | |
| [chemical structure] | CTCGACATTGATTATTGACTAGTTATTAATAGTAATCAATTACGGGGTCA TTAGTTCATAGCCCATATATGGAGTTCCGCGTTACATAACTTACGGTAAA TGGCCCGCCTGGCTGACCGCCCAACGACCCCCGCCCATTGACGTCAAT AATGACGTATGTTCCCATAGTAACGCCAATAGGGACTTTCCATTGACGT CAATGGGTGGAGTATTTACGGTAAACTGCCCACTTGGCAGTACATCAAG TGTATCATATGCCAAGTACGCCCCCTATTGACGTCAATGACGGTAAATG GCCCGCCTGGCATTATGCCCAGTACATGACCTTATGGGACTTTCCTACT TGGCAGTACATCTACGTATTAGTCATCGCTATTACCATGGTCGAGGTGA GCCCCACGTTCTGCTTCACTCTCCCCATCTCCCCCCCCTCCCCACCCC CAATTTTGTATTTATTTATTTTTTAATTATTTTGTGCAGCGATGGGGGCG GGGGGGGGGGGGGGGCGCGCGCCAGGCGGGGCGGGGCGGGGCGA GGGGCGGGGCGGGGCGAGGCGGAGAGGTGCGGCGGCAGCCAATCA GAGCGGCGCGCTCCGAAAGTTTCCTTTTATGGCGAGGCGGCGGCGGC GGCGGCCCTATAAAAAGCGAAGCGCGCGGCGGGCGGGAGTCGCTGC GCGCTGCCTTCGCCCCGTGCCCCGCTCCGCCGCCGCCTCGCGCCGCC CGCCCCGGCTCTGACTGACCGCGTTACTCCCACAGGTGAGCGGGCGG GACGGCCCTTCTCCTCCGGGCTGTAATTAGCGCTTGGTTTAATGACGG CTTGTTTCTTTTCTGTGGCTGCGTGAAAGCCTTGAGGGGCTCCGGGAG GGCCCTTTGTGCGGGGGGAGCGGCTCGGGGGGTGCGTGCGTGTGTG TGTGCGTGGGGAGCGCCGCGTGCGGCTCCGCGCTGCCCGGCGGCTG TGAGCGCTGCGGGCGCGGCGCGGGGCTTTGTGCGCTCCGCAGTGTGC GCGAGGGGAGCGCGGCCGGGGGCGGTGCCCCGCGGTGCGGGGGGG GCTGCGAGGGGAACAAAGGCTGCGTGCGGGGTGTGTGCGTGGGGGG | 147 |
| | GTGAGCAGGGGGTGTGGGCGCGTCGGTCGGGCTGCAACCCCCCCTG | |
| | CACCCCCCTCCCCGAGTTGCTGAGCACGGCCCGGCTTCGGGTGCGGG | |
| | GCTCCGTACGGGGCGTGGCGCGGGGCTCGCCGTGCCGGGCGGGGGG | |
| | TGGCGGCAGGTGGGGGTGCCGGGCGGGGCGGGGCCGCCTCGGGCC | |
| | GGGGAGGGCTCGGGGGAGGGGCGCGGCGGCCCCCGGAGCGCCGGC | |
| | GGCTGTCGAGGCGCGGCGAGCCGCAGCCATTGCCTTTTATGGTAATCG | |
| | TGCGAGAGGGCGCAGGGACTTCCTTTGTCCCAAATCTGTGCGGAGCCG | |
| | AAATCTGGGAGGCGCCGCCGCACCCCCTCTAGCGGGCGCGGGGCGAA | |
| | GCGGTGCGGCGCCGGCAGGAAGGAAATGGGCGGGGAGGGCCTTCGT | |
| | GCGTCGCCGCGCCGCCGTCCCCTTCTCCCTCTCCAGCCTCGGGGCTG | |
| | TCCGCGGGGGGACGGCTGCCTTCGGGGGGGACGGGGCAGGGCGGG | |
| | GTTCGGCTTCTGGCGTGTGACCGGCGGCTCTAGAGCCTCTGCTAACCA | |
| | TGTTCATGCCTTCTTCTTTTTCCTACAGCTCCTGGGCAACGTGCTGGTT | |
| | ATTGTGCTGTCTCATCATTTTGGCAAAGAATTGGAGAATAAACTAGTATT | |
| | CTTCTGGTCCCCACAGACTCAGAGAGAACCCGCCACCATGTTCGTGTT | |
| | CCTGGTGCTGCTGCCCCTGGTGAGCAGCCAGTGCGTGAACCTGACCA | |
| | CCAGGACCCAGCTGCCCCCCGCCTACACCAACAGCTTCACCAGGGGC | |
| | GTGTACTACCCCGACAAGGTGTTCAGGAGCAGCGTGCTGCACAGCACC | |
| | CAGGACCTGTTCCTGCCCTTCTTCAGCAACGTGACCTGGTTCCACGCC | |
| | ATCCACGTGAGCGGCACCAACGGCACCAAGAGGTTCGACAACCCCGT | |
| | GCTGCCCTTCAACGACGGCGTGTACTTCGCCAGCACCGAGAAGAGCAA | |
| | CATCATCAGGGGCTGGATCTTCGGCACCACCCTGGACAGCAAGACCCA | |
| | GAGCCTGCTGATCGTGAACAACGCCACCAACGTGGTGATCAAGGTGTG | |
| | CGAGTTCCAGTTCTGCAACGACCCCTTCCTGGGCGTGTACTACCACAA | |
| | GAACAACAAGAGCTGGATGGAGAGCGAGTTCAGGGTGTACAGCAGCG | |
| | CCAACAACTGCACCTTCGAGTACGTGAGCCAGCCCTTCCTGATGGACC | |
| | TGGAGGGCAAGCAGGGCAACTTCAAGAACCTGAGGGAGTTCGTGTTCA | |
| | AGAACATCGACGGCTACTTCAAGATCTACAGCAAGCACACCCCCATCAA | |
| | CCTGGTGAGGGACCTGCCCCAGGGCTTCAGCGCCCTGGAGCCCCTGG | |
| | TGGACCTGCCCATCGGCATCAACATCACCAGGTTCCAGACCCTGCTGG | |
| | CCCTGCACAGGAGCTACCTGACCCCCGGCGACAGCAGCAGCGGCTGG | |
| | ACCGCCGGCGCCGCCGCCTACTACGTGGGCTACCTGCAGCCCAGGAC | |
| | CTTCCTGCTGAAGTACAACGAGAACGGCACCATCACCGACGCCGTGGA | |
| | CTGCGCCCTGGACCCCCTGAGCGAGACCAAGTGCACCCTGAAGAGCTT | |
| | CACCGTGGAGAAGGGCATCTACCAGACCAGCAACTTCAGGGTGCAGCC | |
| | CACCGAGAGCATCGTGAGGTTCCCCAACATCACCAACCTGTGCCCCTT | |
| | CGGCGAGGTGTTCAACGCCACCAGGTTCGCCAGCGTGTACGCCTGGA | |
| | ACAGGAAGAGGATCAGCAACTGCGTGGCCGACTACAGCGTGCTGTACA | |
| | ACAGCGCCAGCTTCAGCACCTTCAAGTGCTACGGCGTGAGCCCCACCA | |
| | AGCTGAACGACCTGTGCTTCACCAACGTGTACGCCGACAGCTTCGTGA | |
| | TCAGGGGCGACGAGGTGAGGCAGATCGCCCCCGGCCAGACCGGCAA | |
| | GATCGCCGACTACAACTACAAGCTGCCCGACGACTTCACCGGCTGCGT | |
| | GATCGCCTGGAACAGCAACAACCTGGACAGCAAGGTGGGCGGCAACT | |
| | ACAACTACCTGTACAGGCTGTTCAGGAAGAGCAACCTGAAGCCCTTCG | |
| | AGAGGGACATCAGCACCGAGATCTACCAGGCCGGCAGCACCCCCTGC | |
| | AACGGCGTGGAGGGCTTCAACTGCTACTTCCCCCTGCAGAGCTACGGC | |
| | TTCCAGCCCACCAACGGCGTGGGCTACCAGCCCTACAGGGTGGTGGT | |
| | GCTGAGCTTCGAGCTGCTGCACGCCCCCGCCACCGTGTGCGGCCCCA | |
| | AGAAGAGCACCAACCTGGTGAAGAACAAGTGCGTGAACTTCAACTTCAA | |
| | CGGCCTGACCGGCACCGGCGTGCTGACCGAGAGCAACAAGAAGTTCC | |
| | TGCCCTTCCAGCAGTTCGGCAGGGACATCGCCGACACCACCGACGCC | |
| | GTGAGGGACCCCCAGACCCTGGAGATCCTGGACATCACCCCCTGCAG | |
| | CTTCGGCGGCGTGAGCGTGATCACCCCCGGCACCAACACCAGCAACC | |
| | AGGTGGCCGTGCTGTACCAGGACGTGAACTGCACCGAGGTGCCCGTG | |
| | GCCATCCACGCCGACCAGCTGACCCCCACCTGGAGGGTGTACAGCAC | |
| | CGGCAGCAACGTGTTCCAGACCAGGGCCGGCTGCCTGATCGGCGCCG | |
| | AGCACGTGAACAACAGCTACGAGTGCGACATCCCCATCGGCGCCGGC | |
| | ATCTGCGCCAGCTACCAGACCCAGACCAACAGCCCCGGCAGCGCCAG | |
| | CAGCGTGGCCAGCCAGAGCATCATCGCCTACACCATGAGCCTGGGCG | |
| | CCGAGAACAGCGTGGCCTACAGCAACAACAGCATCGCCATCCCCACCA | |
| | ACTTCACCATCAGCGTGACCACCGAGATCCTGCCCGTGAGCATGACCA | |
| | AGACCAGCGTGGACTGCACCATGTACATCTGCGGCGACAGCACCGAGT | |
| | GCAGCAACCTGCTGCTGCAGTACGGCAGCTTCTGCACCCAGCTGAACA | |
| | GGGCCCTGACCGGCATCGCCGTGGAGCAGGACAAGAACACCCAGGAG | |
| | GTGTTCGCCCAGGTGAAGCAGATCTACAAGACCCCCCCCATCAAGGAC | |
| | TTCGGCGGCTTCAACTTCAGCCAGATCCTGCCCGACCCCAGCAAGCCC | |
| | AGCAAGAGGAGCCCCATCGAGGACCTGCTGTTCAACAAGGTGACCCTG | |
| | GCCGACGCCGGCTTCATCAAGCAGTACGGCGACTGCCTGGGCGACAT | |
| | CGCCGCCAGGGACCTGATCTGCGCCCAGAAGTTCAACGGCCTGACCG | |
| | TGCTGCCCCCCCTGCTGACCGACGAGATGATCGCCCAGTACACCAGCG | |
| | CCCTGCTGGCCGGCACCATCACCAGCGGCTGGACCTTCGGCGCCGGC | |
| | CCCGCCCTGCAGATCCCCTTCCCCATGCAGATGGCCTACAGGTTCAAC | |
| | GGCATCGGCGTGACCCAGAACGTGCTGTACGAGAACCAGAAGCTGATC | |
| | GCCAACCAGTTCAACAGCGCCATCGGCAAGATCCAGGACAGCCTGAGC | |
| | AGCACCCCCAGCGCCCTGGGCAAGCTGCAGGACGTGGTGAACCAGAA | |
| | CGCCCAGGCCCTGAACACCCTGGTGAAGCAGCTGAGCAGCAACTTCG | |
| | GCGCCATCAGCAGCGTGCTGAACGACATCCTGAGCAGGCTGGACCCC | |
| | CCCGAGGCCGAGGTGCAGATCGACAGGCTGATCACCGGCAGGCTGCA | |
| | GAGCCTGCAGACCTACGTGACCCAGCAGCTGATCAGGGCCGCCGAGA | |
| | TCAGGGCCAGCGCCAACCTGGCCGCCACCAAGATGAGCGAGTGCGTG | |
| | CTGGGCCAGAGCAAGAGGGTGGACTTCTGCGGCAAGGGCTACCACCT | |
| | GATGAGCTTCCCCCAGAGCGCCCCCCACGGCGTGGTGTTCCTGCACG | |
| | TGACCTACGTGCCCGCCCAGGAGAAGAACTTCACCACCGCCCCCGCCA | |
| | TCTGCCACGACGGCAAGGCCCACTTCCCCAGGGAGGGCGTGTTCGTG | |
| | AGCAACGGCACCCACTGGTTCGTGACCCAGAGGAACTTCTACGAGCCC | |
| | CAGATCATCACCACCGACAACACCTTCGTGAGCGGCAACTGCGACGTG | |
| | GTGATCGGCATCGTGAACAACACCGTGTACGACCCCCTGCAGCCCGAG | |
| | CTGGACAGCTTCAAGGAGGAGCTGGACAAGTACTTCAAGAACCACACC | |
| | AGCCCCGACGTGGACCTGGGCGACATCAGCGGCATCAACGCCAGCGT | |
| | GGTGAACATCCAGAAGGAGATCGACAGGCTGAACGAGGTGGCCAAGA | |
| | ACCTGAACGAGAGCCTGATCGACCTGCAGGAGCTGGGCAAGTACGAG | |
| | CAGTACATCAAGTGGCCCTGGTACATCTGGCTGGGCTTCATCGCCGGC | |
| | CTGATCGCCATCGTGATGGTGACCATCATGCTGTGCTGCATGACCAGC | |
| | TGCTGCAGCTGCCTGAAGGGCTGCTGCAGCTGCGGCAGCTGCTGCAA | |
| | GTTCGACGAGGACGACAGCGAGCCCGTGCTGAAGGGCGTGAAGCTGC | |
| | ACTACACCGGAAGCGGAGCCACGAACTTCTCTCTGTTAAAGCAAGCAG | |
| | GAGATGTTGAAGAAAACCCCGGGCCTATGAACAGGAAGGTGACCGCC | |
| | ATCGCCCTGGCCGCCATCATCTGGGCCACCGCCGCCCAGGGCTTCCT | |
| | GATGTTCAAGCAGGGCAGGTGCCTGTGCATCGGCCCCGGCATGAAGG | |
| | CCGTGAAGATGGCCGAGATCGAGAAGGCCAGCGTGATCTACCCCAG | |
| | CAACGGCTGCGACAAGGTGGAGGTGATCGTGACCATGAAGGCCCAC | |
| | AAGAGGCAGAGGTGCCTGGACCCCAGGAGCAAGCAGGCCAGGCTGA | |
| | TCATGCAGGCCATCGAGAAGAAGAACTTCCTGAGGAGGCAGAACATG | |
| | TGAGGAAGCGGAGCCACGAACTTCTCTCTGTTAAAGCAAGCAGGAGAT | |
| | GTTGAAGAAAACCCCGGGCCTATGTTCCACGTGAGCTTCAGGTACATC | |
| | TTCGGCATCCCCCCCCTGATCCTGGTGCTGCTGCCCGTGACCAGCAG | |
| | CGAGTGCCACATCAAGGACAAGGAGGGCAAGGCCTACGAGAGCGTG | |
| | CTGATGATCAGCATCGACGAGCTGGACAAGATGACCGGCACCGACAG | |
| | CAACTGCCCCAACAACGAGCCCAACTTCTTCAGGAAGCACGTGTGCG | |
| | ACGACACCAAGGAGGCCGCCTTCCTGAACAGGGCCGCCAGGAAGCT | |
| | GAAGCAGTTCCTGAAGATGAACATCAGCGAGGAGTTCAACGTGCACC | |
| | TGCTGACCGTGAGCCAGGGCACCCAGACCCTGGTGAACTGCACCAGC | |
| | AAGGAGGAGAAGAACGTGAAGGAGCAGAAGAAGAACGACGCCTGCT | |
| | TCCTGAAGAGGCTGCTGAGGGAGATCAAGACCTGCTGGAACAAGATC | |
| | [chemical structure] | |
| 10 | TAGTTATTAATAGTAATCAATTACGGGGTCATTAGTTCATAGCCCATATA | 295 |
| Ad5-Pan-CoV | TGGAGTTCCGCGTTACATAACTTACGGTAAATGGCCCGCCTGGCTGAC | |
| Spike-NSP1- | CGCCCAACGACCCCCGCCCATTGACGTCAATAATGACGTATGTTCCCAT | |
| NSP2 | AGTAACGCCAATAGGGACTTTCCATTGACGTCAATGGGTGGAGTATTTA | |
| | CGGTAAACTGCCCACTTGGCAGTACATCAAGTGTATCATATGCCAAGTA | |
| | CGCCCCCTATTGACGTCAATGACGGTAAATGGCCCGCCTGGCATTATG | |
| | CCCAGTACATGACCTTATGGGACTTTCCTACTTGGCAGTACATCTACGT | |
| | ATTAGTCATCGCTATTACCATGGTGATGCGGTTTTGGCAGTACATCAAT | |
| | GGGCGTGGATAGCGGTTTGACTCACGGGGATTTCCAAGTCTCCACCCC | |
| | ATTGACGTCAATGGGAGTTTGTTTTGGCACCAAAATCAACGGGACTTTC | |
| | CAAAATGTCGTAACAACTCCGCCCCATTGACGCAAATGGGCGGTAGGC | |
| | GTGTACGGTGGGAGGTCTATATAAGCAGAGCTGGTTTAGTGAACCGTC | |
| | AGATCGAGAATAAACTAGTATTCTTCTGGTCCCCACAGACTCAGAGAGA | |
| | ACCCGCCACCATGTTCGTGTTCCTGGTGCTGCTGCCCCTGGTGAGCAG | |
| | CCAGTGCGTGAACCTGACCACCAGGACCCAGCTGCCCCCCGCCTACA | |
| | CCAACAGCTTCACCAGGGGCGTGTACTACCCCGACAAGGTGTTCAGGA | |
| | GCAGCGTGCTGCACAGCACCCAGGACCTGTTCCTGCCCTTCTTCAGCA | |
| | ACGTGACCTGGTTCCACGCCATCCACGTGAGCGGCACCAACGGCACCA | |
| | AGAGGTTCGACAACCCCGTGCTGCCCTTCAACGACGGCGTGTACTTCG | |
| | CCAGCACCGAGAAGAGCAACATCATCAGGGGCTGGATCTTCGGCACCA | |
| | CCCTGGACAGCAAGACCCAGAGCCTGCTGATCGTGAACAACGCCACCA | |
| | ACGTGGTGATCAAGGTGTGCGAGTTCCAGTTCTGCAACGACCCCTTCC | |
| | TGGGCGTGTACTACCACAAGAACAACAAGAGCTGGATGGAGAGCGAGT | |
| | TCAGGGTGTACAGCAGCGCCAACAACTGCACCTTCGAGTACGTGAGCC | |
| | AGCCCTTCCTGATGGACCTGGAGGGCAAGCAGGGCAACTTCAAGAACC | |
| | TGAGGGAGTTCGTGTTCAAGAACATCGACGGCTACTTCAAGATCTACAG | |
| | CAAGCACACCCCCATCAACCTGGTGAGGGACCTGCCCCAGGGCTTCAG | |
| | CGCCCTGGAGCCCCTGGTGGACCTGCCCATCGGCATCAACATCACCAG | |
| | GTTCCAGACCCTGCTGGCCCTGCACAGGAGCTACCTGACCCCCGGCG | |
| | ACAGCAGCAGCGGCTGGACCGCCGGCGCCGCCGCCTACTACGTGGGC | |
| | TACCTGCAGCCCAGGACCTTCCTGCTGAAGTACAACGAGAACGGCACC | |
| | ATCACCGACGCCGTGGACTGCGCCCTGGACCCCCTGAGCGAGACCAA | |
| | GTGCACCCTGAAGAGCTTCACCGTGGAGAAGGGCATCTACCAGACCAG | |
| | CAACTTCAGGGTGCAGCCCACCGAGAGCATCGTGAGGTTCCCCAACAT | |
| | CACCAACCTGTGCCCCTTCGGCGAGGTGTTCAACGCCACCAGGTTCGC | |
| | CAGCGTGTACGCCTGGAACAGGAAGAGGATCAGCAACTGCGTGGCCG | |
| | ACTACAGCGTGCTGTACAACAGCGCCAGCTTCAGCACCTTCAAGTGCT | |
| | ACGGCGTGAGCCCCACCAAGCTGAACGACCTGTGCTTCACCAACGTGT | |
| | ACGCCGACAGCTTCGTGATCAGGGGCGACGAGGTGAGGCAGATCGCC | |
| | CCCGGCCAGACCGGCAAGATCGCCGACTACAACTACAAGCTGCCCGA | |
| | CGACTTCACCGGCTGCGTGATCGCCTGGAACAGCAACAACCTGGACAG | |
| | CAAGGTGGGCGGCAACTACAACTACCTGTACAGGCTGTTCAGGAAGAG | |
| | CAACCTGAAGCCCTTCGAGAGGGACATCAGCACCGAGATCTACCAGGC | |
| | CGGCAGCACCCCCTGCAACGGCGTGGAGGGCTTCAACTGCTACTTCCC | |
| | CCTGCAGAGCTACGGCTTCCAGCCCACCAACGGCGTGGGCTACCAGC | |
| | CCTACAGGGTGGTGGTGCTGAGCTTCGAGCTGCTGCACGCCCCCGCC | |
| | ACCGTGTGCGGCCCCAAGAAGAGCACCAACCTGGTGAAGAACAAGTGC | |
| | GTGAACTTCAACTTCAACGGCCTGACCGGCACCGGCGTGCTGACCGAG | |
| | AGCAACAAGAAGTTCCTGCCCTTCCAGCAGTTCGGCAGGGACATCGCC | |
| | GACACCACCGACGCCGTGAGGGACCCCCAGACCCTGGAGATCCTGGA | |
| | CATCACCCCCTGCAGCTTCGGCGGCGTGAGCGTGATCACCCCCGGCA | |
| | CCAACACCAGCAACCAGGTGGCCGTGCTGTACCAGGACGTGAACTGCA | |
| | CCGAGGTGCCCGTGGCCATCCACGCCGACCAGCTGACCCCCACCTGG | |
| | AGGGTGTACAGCACCGGCAGCAACGTGTTCCAGACCAGGGCCGGCTG | |
| | CCTGATCGGCGCCGAGCACGTGAACAACAGCTACGAGTGCGACATCCC | |
| | CATCGGCGCCGGCATCTGCGCCAGCTACCAGACCCAGACCAACAGCC | |
| | CCAGGAGGGCCAGGAGCGTGGCCAGCCAGAGCATCATCGCCTACACC | |
| | ATGAGCCTGGGCGCCGAGAACAGCGTGGCCTACAGCAACAACAGCAT | |
| | CGCCATCCCCACCAACTTCACCATCAGCGTGACCACCGAGATCCTGCC | |
| | CGTGAGCATGACCAAGACCAGCGTGGACTGCACCATGTACATCTGCGG | |
| | CGACAGCACCGAGTGCAGCAACCTGCTGCTGCAGTACGGCAGCTTCTG | |
| | CACCCAGCTGAACAGGGCCCTGACCGGCATCGCCGTGGAGCAGGACA | |
| | AGAACACCCAGGAGGTGTTCGCCCAGGTGAAGCAGATCTACAAGACCC | |
| | CCCCCATCAAGGACTTCGGCGGCTTCAACTTCAGCCAGATCCTGCCCG | |
| | ACCCCAGCAAGCCCAGCAAGAGGAGCTTCATCGAGGACCTGCTGTTCA | |
| | ACAAGGTGACCCTGGCCGACGCCGGCTTCATCAAGCAGTACGGCGACT | |
| | GCCTGGGCGACATCGCCGCCAGGGACCTGATCTGCGCCCAGAAGTTC | |
| | AACGGCCTGACCGTGCTGCCCCCCCTGCTGACCGACGAGATGATCGC | |
| | CCAGTACACCAGCGCCCTGCTGGCCGGCACCATCACCAGCGGCTGGA | |
| | CCTTCGGCGCCGGCGCCGCCCTGCAGATCCCCTTCGCCATGCAGATG | |
| | GCCTACAGGTTCAACGGCATCGGCGTGACCCAGAACGTGCTGTACGAG | |
| | AACCAGAAGCTGATCGCCAACCAGTTCAACAGCGCCATCGGCAAGATC | |
| | CAGGACAGCCTGAGCAGCACCGCCAGCGCCCTGGGCAAGCTGCAGGA | |
| | CGTGGTGAACCAGAACGCCCAGGCCCTGAACACCCTGGTGAAGCAGC | |
| | TGAGCAGCAACTTCGGCGCCATCAGCAGCGTGCTGAACGACATCCTGA | |
| | GCAGGCTGGACCCCCCCGAGGCCGAGGTGCAGATCGACAGGCTGATC | |
| | ACCGGCAGGCTGCAGAGCCTGCAGACCTACGTGACCCAGCAGCTGAT | |
| | CAGGGCCGCCGAGATCAGGGCCAGCGCCAACCTGGCCGCCACCAAGA | |
| | TGAGCGAGTGCGTGCTGGGCCAGAGCAAGAGGGTGGACTTCTGCGGC | |
| | AAGGGCTACCACCTGATGAGCTTCCCCCAGAGCGCCCCCCACGGCGT | |
| | GGTGTTCCTGCACGTGACCTACGTGCCCGCCCAGGAGAAGAACTTCAC | |
| | CACCGCCCCCGCCATCTGCCACGACGGCAAGGCCCACTTCCCCAGGG | |
| | AGGGCGTGTTCGTGAGCAACGGCACCCACTGGTTCGTGACCCAGAGG | |
| | AACTTCTACGAGCCCCAGATCATCACCACCGACAACACCTTCGTGAGC | |
| | GGCAACTGCGACGTGGTGATCGGCATCGTGAACAACACCGTGTACGAC | |
| | CCCCTGCAGCCCGAGCTGGACAGCTTCAAGGAGGAGCTGGACAAGTA | |
| | CTTCAAGAACCACACCAGCCCCGACGTGGACCTGGGCGACATCAGCG | |
| | GCATCAACGCCAGCGTGGTGAACATCCAGAAGGAGATCGACAGGCTGA | |
| | ACGAGGTGGCCAAGAACCTGAACGAGAGCCTGATCGACCTGCAGGAG | |
| | CTGGGCAAGTACGAGCAGTACATCAAGTGGCCCTGGTACATCTGGCTG | |
| | GGCTTCATCGCCGGCCTGATCGCCATCGTGATGGTGACCATCATGCTG | |
| | TGCTGCATGACCAGCTGCTGCAGCTGCCTGAAGGGCTGCTGCAGCTGC | |
| | GGCAGCTGCTGCAAGTTCGACGAGGACGACAGCGAGCCCGTGCTGAA | |
| | GGGCGTGAAGCTGCACTACACCGGAAGCGGAGCCACGAACTTCTCTCT | |
| | GTTAAAGCAAGCAGGAGATGTTGAAGAAAACCCCGGGCCTATGGAGAG | |
| | CCTGGTGCCCGGCTTCAACGAGAAGACCCACGTGCAGCTGAGCCTGC | |
| | CCGTGCTGCAGGTGAGGGACGTGCTGGTGAGGGGCTTCGGCGACAGC | |
| | GTGGAGGAGGTGCTGAGCGAGGCCAGGCAGCACCTGAAGGACGGCAC | |
| | CTGCGGCCTGGTGGAGGTGGAGAAGGGCGTGCTGCCCCAGCTGGAGC | |
| | AGCCCTACGTGTTCATCAAGAGGAGCGACGCCAGGACCGCCCCCCAC | |
| | GGCCACGTGATGGTGGAGCTGGTGGCCGAGCTGGAGGGCATCCAGTA | |
| | CGGCAGGAGCGGCGAGACCCTGGGCGTGCTGGTGCCCCACGTGGGC | |
| | GAGATCCCCGTGGCCTACAGGAAGGTGCTGCTGAGGAAGAACGGCAA | |
| | CAAGGGCGCCGGCGGCCACAGCTACGGCGCCGACCTGAAGAGCTTCG | |
| | ACCTGGGCGACGAGCTGGGCACCGACCCCTACGAGGACTTCCAGGAG | |
| | AACTGGAACACCAAGCACAGCAGCGGCGTGACCAGGGAGCTGATGAG | |
| | GGAGCTGAACGGCGGCGGAAGCGGAGAGGGCAGGGGAAGTCTTCTAA | |
| | CATGCGGGGACGTGGAGGAAAATCCCGGCCCCGCCTACACCAGGTAC | |
| | GTGGACAACAACTTCTGCGGCCCCGACGGCTACCCCCTGGAGTGCATC | |
| | AAGGACCTGCTGGCCAGGGCCGGCAAGGCCAGCTGCACCCTGAGCGA | |
| | GCAGCTGGACTTCATCGACACCAAGAGGGGCGTGTACTGCTGCAGGG | |
| | AGCACGAGCACGAGATCGCCTGGTACACCGAGAGGAGCGAGAAGAGC | |
| | TACGAGCTGCAGACCCCCTTCGAGATCAAGCTGGCCAAGAAGTTCGAC | |
| | ACCTTCAACGGCGAGTGCCCCAACTTCGTGTTCCCCCTGAACAGCATC | |
| | ATCAAGACCATCCAGCCCAGGGTGGAGAAGAAGAAGCTGGACGGCTTC | |
| | ATGGGCAGGATCAGGAGCGTGTACCCCGTGGCCAGCCCCAACGAGTG | |
| | CAACCAGATGTGCCTGAGCACCCTGATGAAGTGCGACCACTGCGGCGA | |
| | GACCAGCTGGCAGACCGGCGACTTCGTGAAGGCCACCTGCGAGTTCT | |
| | GCGGCACCGAGAACCTGACCAAGGAGGGCGCCACCACCTGCGGCTAC | |
| | CTGCCCCAGAACGCCGTGGTGAAGATCTACTGCCCCGCCTGCCACAAC | |
| | AGCGAGGTGGGCCCCGAGCACAGCCTGGCCGAGTACCACAACGAGAG | |
| | CGGCCTGAAGACCATCCTGAGGAAGGGCGGCAGGACCATCGCCTTCG | |
| | GCGGCTGCGTGTTCAGCTACGTGGGCTGCCACAACAAGTGCGCCTACT | |
| | GGGTGCCCAGGGCCAGCGCCAACATCGGCTGCAACCACACCGGCGTG | |
| | GTGGGCGAGGGCAGCGAGGGCCTGAACGACAACCTGCTGGAGATCCT | |
| | GCAGAAGGAGAAGGTGAACATCAACATCGTGGGCGACTTCAAGCTGAA | |
| | CGAGGAGATCGCCATCATCCTGGCCAGCTTCAGCGCCAGCACCAGCG | |
| | CCTTCGTGGAGACCGTGAAGGGCCTGGACTACAAGGCCTTCAAGCAGA | |
| | TCGTGGAGAGCTGCGGCAACTTCAAGGTGACCAAGGGCAAGGCCAAG | |
| | AAGGGCGCCTGGAACATCGGCGAGCAGAAGAGCATCCTGAGCCCCCT | |
| | GTACGCCTTCGCCAGCGAGGCCGCCAGGGTGGTGAGGAGCATCTTCA | |
| | GCAGGACCCTGGAGACCGCCCAGAACAGCGTGAGGGTGCTGCAGAAG | |
| | GCCGCCATCACCATCCTGGACGGCATCAGCCAGTACAGCCTGAGGCTG | |
| | ATCGACGCCATGATGTTCACCAGCGACCTGGCCACCAACAACCTGGTG | |
| | GTGATGGCCTACATCACCGGCGGCGTGGTGCAGCTGACCAGCCAGTG | |
| | GCTGACCAACATCTTCGGCACCGTGTACGAGAAGCTGAAGCCCGTGCT | |
| | GGACTGGCTGGAGGAGAAGTTCAAGGAGGGCGTGGAGTTCCTGAGGG | |
| | ACGGCTGGGAGATCGTGAAGTTCATCAGCACCTGCGCCTGCGAGATCG | |
| | TGGGCGGCCAGATCGTGACCTGCGCCAAGGAGATCAAGGAGAGCGTG | |
| | CAGACCTTCTTCAAGCTGGTGAACAAGTTCCTGGCCCTGTGCGCCGAC | |
| | AGCATCATCATCGGCGGCGCCAAGCTGAAGGCCCTGAACCTGGGCGA | |
| | GACCTTCGTGACCCACAGCAAGGGCCTGTACAGGAAGTGCGTGAAGAG | |
| | CAGGGAGGAGACCGGCCTGCTGATGCCCCTGAAGGCCCCCAAGGAGA | |
| | TCATCTTCCTGGAGGGCGAGACCCTGCCCACCGAGGTGCTGACCGAG | |
| | GAGGTGGTGCTGAAGACCGGCGACCTGCAGCCCCTGGAGCAGCCCAC | |
| | CAGCGAGGCCGTGGAGGCCCCCCTGGTGGGCACCCCCGTGTGCATCA | |
| | ACGGCCTGATGCTGCTGGAGATCAAGGACACCGAGAAGTACTGCGCCC | |
| | TGGCCCCCAACATGATGGTGACCAACAACACCTTCACCCTGAAGGGCG | |
| | GCTGATGACTCGAGCTGGTACTGCATGCACGCAATGCTAGCTGCCCCT | |
| | TTCCCGTCCTGGGTACCCCGAGTCTCCCCCGACCTCGGGTCCCAGGTA | |
| | TGCTCCCACCTCCACCTGCCCCACTCACCACCTCTGCTAGTTCCAGACA | |
| | CCTCCCAAGCACGCAGCAATGCAGCTCAAAACGCTTAGCCTAGCCACA | |
| | CCCCCACGGGAAACAGCAGTGATTAACCTTTAGCAATAAACGAAAGTTT | |
| | AACTAAGCTATACTAACCCCAGGGTTGGTCAATTTCGTGCCAGCCACAC | |
| | CCTGGAGCTAGCAAAAAAAA | |
| 11 | TAGTTATTAATAGTAATCAATTACGGGGTCATTAGTTCATAGCCCATATA | 296 |
| Ad5-Pan-CoV | TGGAGTTCCGCGTTACATAACTTACGGTAAATGGCCCGCCTGGCTGAC | |
| HexaPro- | CGCCCAACGACCCCCGCCCATTGACGTCAATAATGACGTATGTTCCCAT | |
| NSP1-NSP2 | AGTAACGCCAATAGGGACTTTCCATTGACGTCAATGGGTGGAGTATTTA | |
| | CGGTAAACTGCCCACTTGGCAGTACATCAAGTGTATCATATGCCAAGTA | |
| | CGCCCCCTATTGACGTCAATGACGGTAAATGGCCCGCCTGGCATTATG | |
| | CCCAGTACATGACCTTATGGGACTTTCCTACTTGGCAGTACATCTACGT | |
| | ATTAGTCATCGCTATTACCATGGTGATGCGGTTTTGGCAGTACATCAAT | |
| | GGGCGTGGATAGCGGTTTGACTCACGGGGATTTCCAAGTCTCCACCCC | |
| | ATTGACGTCAATGGGAGTTTGTTTTGGCACCAAAATCAACGGGACTTTC | |
| | CAAAATGTCGTAACAACTCCGCCCCATTGACGCAAATGGGCGGTAGGC | |
| | GTGTACGGTGGGAGGTCTATATAAGCAGAGCTGGTTTAGTGAACCGTC | |
| | AGATCGAGAATAAACTAGTATTCTTCTGGTCCCCACAGACTCAGAGAGA | |
| | ACCCGCCACCATGTTCGTGTTCCTGGTGCTGCTGCCCCTGGTGAGCAG | |
| | CCAGTGCGTGAACCTGACCACCAGGACCCAGCTGCCCCCCGCCTACA | |
| | CCAACAGCTTCACCAGGGGCGTGTACTACCCCGACAAGGTGTTCAGGA | |
| | GCAGCGTGCTGCACAGCACCCAGGACCTGTTCCTGCCCTTCTTCAGCA | |
| | ACGTGACCTGGTTCCACGCCATCCACGTGAGCGGCACCAACGGCACCA | |
| | AGAGGTTCGACAACCCCGTGCTGCCCTTCAACGACGGCGTGTACTTCG | |
| | CCAGCACCGAGAAGAGCAACATCATCAGGGGCTGGATCTTCGGCACCA | |
| | CCCTGGACAGCAAGACCCAGAGCCTGCTGATCGTGAACAACGCCACCA | |
| | ACGTGGTGATCAAGGTGTGCGAGTTCCAGTTCTGCAACGACCCCTTCC | |
| | TGGGCGTGTACTACCACAAGAACAACAAGAGCTGGATGGAGAGCGAGT | |
| | TCAGGGTGTACAGCAGCGCCAACAACTGCACCTTCGAGTACGTGAGCC | |
| | AGCCCTTCCTGATGGACCTGGAGGGCAAGCAGGGCAACTTCAAGAACC | |
| | TGAGGGAGTTCGTGTTCAAGAACATCGACGGCTACTTCAAGATCTACAG | |
| | CAAGCACACCCCCATCAACCTGGTGAGGGACCTGCCCCAGGGCTTCAG | |
| | CGCCCTGGAGCCCCTGGTGGACCTGCCCATCGGCATCAACATCACCAG | |
| | GTTCCAGACCCTGCTGGCCCTGCACAGGAGCTACCTGACCCCCGGCG | |
| | ACAGCAGCAGCGGCTGGACCGCCGGCGCCGCCGCCTACTACGTGGGC | |
| | TACCTGCAGCCCAGGACCTTCCTGCTGAAGTACAACGAGAACGGCACC | |
| | ATCACCGACGCCGTGGACTGCGCCCTGGACCCCCTGAGCGAGACCAA | |
| | GTGCACCCTGAAGAGCTTCACCGTGGAGAAGGGCATCTACCAGACCAG | |
| | CAACTTCAGGGTGCAGCCCACCGAGAGCATCGTGAGGTTCCCCAACAT | |
| | CACCAACCTGTGCCCCTTCGGCGAGGTGTTCAACGCCACCAGGTTCGC | |
| | CAGCGTGTACGCCTGGAACAGGAAGAGGATCAGCAACTGCGTGGCCG | |
| | ACTACAGCGTGCTGTACAACAGCGCCAGCTTCAGCACCTTCAAGTGCT | |
| | ACGGCGTGAGCCCCACCAAGCTGAACGACCTGTGCTTCACCAACGTGT | |
| | ACGCCGACAGCTTCGTGATCAGGGGCGACGAGGTGAGGCAGATCGCC | |
| | CCCGGCCAGACCGGCAAGATCGCCGACTACAACTACAAGCTGCCCGA | |
| | CGACTTCACCGGCTGCGTGATCGCCTGGAACAGCAACAACCTGGACAG | |
| | CAAGGTGGGCGGCAACTACAACTACCTGTACAGGCTGTTCAGGAAGAG | |
| | CAACCTGAAGCCCTTCGAGAGGGACATCAGCACCGAGATCTACCAGGC | |
| | CGGCAGCACCCCCTGCAACGGCGTGGAGGGCTTCAACTGCTACTTCCC | |
| | CCTGCAGAGCTACGGCTTCCAGCCCACCAACGGCGTGGGCTACCAGC | |
| | CCTACAGGGTGGTGGTGCTGAGCTTCGAGCTGCTGCACGCCCCCGCC | |
| | ACCGTGTGCGGCCCCAAGAAGAGCACCAACCTGGTGAAGAACAAGTGC | |
| | GTGAACTTCAACTTCAACGGCCTGACCGGCACCGGCGTGCTGACCGAG | |
| | AGCAACAAGAAGTTCCTGCCCTTCCAGCAGTTCGGCAGGGACATCGCC | |
| | GACACCACCGACGCCGTGAGGGACCCCCAGACCCTGGAGATCCTGGA | |
| | CATCACCCCCTGCAGCTTCGGCGGCGTGAGCGTGATCACCCCCGGCA | |
| | CCAACACCAGCAACCAGGTGGCCGTGCTGTACCAGGACGTGAACTGCA | |
| | CCGAGGTGCCCGTGGCCATCCACGCCGACCAGCTGACCCCCACCTGG | |
| | AGGGTGTACAGCACCGGCAGCAACGTGTTCCAGACCAGGGCCGGCTG | |
| | CCTGATCGGCGCCGAGCACGTGAACAACAGCTACGAGTGCGACATCCC | |
| | CATCGGCGCCGGCATCTGCGCCAGCTACCAGACCCAGACCAACAGCC | |
| | CCGGCAGCGCCAGCAGCGTGGCCAGCCAGAGCATCATCGCCTACACC | |
| | ATGAGCCTGGGCGCCGAGAACAGCGTGGCCTACAGCAACAACAGCAT | |
| | CGCCATCCCCACCAACTTCACCATCAGCGTGACCACCGAGATCCTGCC | |
| | CGTGAGCATGACCAAGACCAGCGTGGACTGCACCATGTACATCTGCGG | |
| | CGACAGCACCGAGTGCAGCAACCTGCTGCTGCAGTACGGCAGCTTCTG | |
| | CACCCAGCTGAACAGGGCCCTGACCGGCATCGCCGTGGAGCAGGACA | |
| | AGAACACCCAGGAGGTGTTCGCCCAGGTGAAGCAGATCTACAAGACCC | |
| | CCCCCATCAAGGACTTCGGCGGCTTCAACTTCAGCCAGATCCTGCCCG | |
| | ACCCCAGCAAGCCCAGCAAGAGGAGCCCCATCGAGGACCTGCTGTTCA | |
| | ACAAGGTGACCCTGGCCGACGCCGGCTTCATCAAGCAGTACGGCGACT | |
| | GCCTGGGCGACATCGCCGCCAGGGACCTGATCTGCGCCCAGAAGTTC | |
| | AACGGCCTGACCGTGCTGCCCCCCCTGCTGACCGACGAGATGATCGC | |
| | CCAGTACACCAGCGCCCTGCTGGCCGGCACCATCACCAGCGGCTGGA | |
| | CCTTCGGCGCCGGCCCCGCCCTGCAGATCCCCTTCCCCATGCAGATG | |
| | GCCTACAGGTTCAACGGCATCGGCGTGACCCAGAACGTGCTGTACGAG | |
| | AACCAGAAGCTGATCGCCAACCAGTTCAACAGCGCCATCGGCAAGATC | |
| | CAGGACAGCCTGAGCAGCACCCCCAGCGCCCTGGGCAAGCTGCAGGA | |
| | CGTGGTGAACCAGAACGCCCAGGCCCTGAACACCCTGGTGAAGCAGC | |
| | TGAGCAGCAACTTCGGCGCCATCAGCAGCGTGCTGAACGACATCCTGA | |
| | GCAGGCTGGACCCCCCCGAGGCCGAGGTGCAGATCGACAGGCTGATC | |
| | ACCGGCAGGCTGCAGAGCCTGCAGACCTACGTGACCCAGCAGCTGAT | |
| | CAGGGCCGCCGAGATCAGGGCCAGCGCCAACCTGGCCGCCACCAAGA | |
| | TGAGCGAGTGCGTGCTGGGCCAGAGCAAGAGGGTGGACTTCTGCGGC | |
| | AAGGGCTACCACCTGATGAGCTTCCCCCAGAGCGCCCCCCACGGCGT | |
| | GGTGTTCCTGCACGTGACCTACGTGCCCGCCCAGGAGAAGAACTTCAC | |
| | CACCGCCCCCGCCATCTGCCACGACGGCAAGGCCCACTTCCCCAGGG | |
| | AGGGCGTGTTCGTGAGCAACGGCACCCACTGGTTCGTGACCCAGAGG | |
| | AACTTCTACGAGCCCCAGATCATCACCACCGACAACACCTTCGTGAGC | |
| | GGCAACTGCGACGTGGTGATCGGCATCGTGAACAACACCGTGTACGAC | |
| | CCCCTGCAGCCCGAGCTGGACAGCTTCAAGGAGGAGCTGGACAAGTA | |
| | CTTCAAGAACCACACCAGCCCCGACGTGGACCTGGGCGACATCAGCG | |
| | GCATCAACGCCAGCGTGGTGAACATCCAGAAGGAGATCGACAGGCTGA | |
| | ACGAGGTGGCCAAGAACCTGAACGAGAGCCTGATCGACCTGCAGGAG | |
| | CTGGGCAAGTACGAGCAGTACATCAAGTGGCCCTGGTACATCTGGCTG | |
| | GGCTTCATCGCCGGCCTGATCGCCATCGTGATGGTGACCATCATGCTG | |
| | TGCTGCATGACCAGCTGCTGCAGCTGCCTGAAGGGCTGCTGCAGCTGC | |
| | GGCAGCTGCTGCAAGTTCGACGAGGACGACAGCGAGCCCGTGCTGAA | |
| | GGGCGTGAAGCTGCACTACACCGGAAGCGGAGCCACGAACTTCTCTCT | |
| | GTTAAAGCAAGCAGGAGATGTTGAAGAAAACCCCGGGCCTATGGAGAG | |
| | CCTGGTGCCCGGCTTCAACGAGAAGACCCACGTGCAGCTGAGCCTGC | |
| | CCGTGCTGCAGGTGAGGGACGTGCTGGTGAGGGGCTTCGGCGACAGC | |
| | GTGGAGGAGGTGCTGAGCGAGGCCAGGCAGCACCTGAAGGACGGCAC | |
| | CTGCGGCCTGGTGGAGGTGGAGAAGGGCGTGCTGCCCCAGCTGGAGC | |
| | AGCCCTACGTGTTCATCAAGAGGAGCGACGCCAGGACCGCCCCCCAC | |
| | GGCCACGTGATGGTGGAGCTGGTGGCCGAGCTGGAGGGCATCCAGTA | |
| | CGGCAGGAGCGGCGAGACCCTGGGCGTGCTGGTGCCCCACGTGGGC | |
| | GAGATCCCCGTGGCCTACAGGAAGGTGCTGCTGAGGAAGAACGGCAA | |
| | CAAGGGCGCCGGCGGCCACAGCTACGGCGCCGACCTGAAGAGCTTCG | |
| | ACCTGGGCGACGAGCTGGGCACCGACCCCTACGAGGACTTCCAGGAG | |
| | AACTGGAACACCAAGCACAGCAGCGGCGTGACCAGGGAGCTGATGAG | |
| | GGAGCTGAACGGCGGCGGAAGCGGAGAGGGCAGGGGAAGTCTTCTAA | |
| | CATGCGGGGACGTGGAGGAAAATCCCGGCCCCGCCTACACCAGGTAC | |
| | GTGGACAACAACTTCTGCGGCCCCGACGGCTACCCCCTGGAGTGCATC | |
| | AAGGACCTGCTGGCCAGGGCCGGCAAGGCCAGCTGCACCCTGAGCGA | |
| | GCAGCTGGACTTCATCGACACCAAGAGGGGCGTGTACTGCTGCAGGG | |
| | AGCACGAGCACGAGATCGCCTGGTACACCGAGAGGAGCGAGAAGAGC | |
| | TACGAGCTGCAGACCCCCTTCGAGATCAAGCTGGCCAAGAAGTTCGAC | |
| | ACCTTCAACGGCGAGTGCCCCAACTTCGTGTTCCCCCTGAACAGCATC | |
| | ATCAAGACCATCCAGCCCAGGGTGGAGAAGAAGAAGCTGGACGGCTTC | |
| | ATGGGCAGGATCAGGAGCGTGTACCCCGTGGCCAGCCCCAACGAGTG | |
| | CAACCAGATGTGCCTGAGCACCCTGATGAAGTGCGACCACTGCGGCGA | |
| | GACCAGCTGGCAGACCGGCGACTTCGTGAAGGCCACCTGCGAGTTCT | |
| | GCGGCACCGAGAACCTGACCAAGGAGGGCGCCACCACCTGCGGCTAC | |
| | CTGCCCCAGAACGCCGTGGTGAAGATCTACTGCCCCGCCTGCCACAAC | |
| | AGCGAGGTGGGCCCCGAGCACAGCCTGGCCGAGTACCACAACGAGAG | |
| | CGGCCTGAAGACCATCCTGAGGAAGGGCGGCAGGACCATCGCCTTCG | |
| | GCGGCTGCGTGTTCAGCTACGTGGGCTGCCACAACAAGTGCGCCTACT | |
| | GGGTGCCCAGGGCCAGCGCCAACATCGGCTGCAACCACACCGGCGTG | |
| | GTGGGCGAGGGCAGCGAGGGCCTGAACGACAACCTGCTGGAGATCCT | |
| | GCAGAAGGAGAAGGTGAACATCAACATCGTGGGCGACTTCAAGCTGAA | |
| | CGAGGAGATCGCCATCATCCTGGCCAGCTTCAGCGCCAGCACCAGCG | |
| | CCTTCGTGGAGACCGTGAAGGGCCTGGACTACAAGGCCTTCAAGCAGA | |
| | TCGTGGAGAGCTGCGGCAACTTCAAGGTGACCAAGGGCAAGGCCAAG | |
| | AAGGGCGCCTGGAACATCGGCGAGCAGAAGAGCATCCTGAGCCCCCT | |
| | GTACGCCTTCGCCAGCGAGGCCGCCAGGGTGGTGAGGAGCATCTTCA | |
| | GCAGGACCCTGGAGACCGCCCAGAACAGCGTGAGGGTGCTGCAGAAG | |
| | GCCGCCATCACCATCCTGGACGGCATCAGCCAGTACAGCCTGAGGCTG | |
| | ATCGACGCCATGATGTTCACCAGCGACCTGGCCACCAACAACCTGGTG | |
| | GTGATGGCCTACATCACCGGCGGCGTGGTGCAGCTGACCAGCCAGTG | |
| | GCTGACCAACATCTTCGGCACCGTGTACGAGAAGCTGAAGCCCGTGCT | |
| | GGACTGGCTGGAGGAGAAGTTCAAGGAGGGCGTGGAGTTCCTGAGGG | |
| | ACGGCTGGGAGATCGTGAAGTTCATCAGCACCTGCGCCTGCGAGATCG | |
| | TGGGCGGCCAGATCGTGACCTGCGCCAAGGAGATCAAGGAGAGCGTG | |
| | CAGACCTTCTTCAAGCTGGTGAACAAGTTCCTGGCCCTGTGCGCCGAC | |
| | AGCATCATCATCGGCGGCGCCAAGCTGAAGGCCCTGAACCTGGGCGA | |
| | GACCTTCGTGACCCACAGCAAGGGCCTGTACAGGAAGTGCGTGAAGAG | |
| | CAGGGAGGAGACCGGCCTGCTGATGCCCCTGAAGGCCCCCAAGGAGA | |
| | TCATCTTCCTGGAGGGCGAGACCCTGCCCACCGAGGTGCTGACCGAG | |
| | GAGGTGGTGCTGAAGACCGGCGACCTGCAGCCCCTGGAGCAGCCCAC | |
| | CAGCGAGGCCGTGGAGGCCCCCCTGGTGGGCACCCCCGTGTGCATCA | |
| | ACGGCCTGATGCTGCTGGAGATCAAGGACACCGAGAAGTACTGCGCCC | |
| | TGGCCCCCAACATGATGGTGACCAACAACACCTTCACCCTGAAGGGCG | |
| | GCTGATGACTCGAGCTGGTACTGCATGCACGCAATGCTAGCTGCCCCT | |
| | TTCCCGTCCTGGGTACCCCGAGTCTCCCCCGACCTCGGGTCCCAGGTA | |
| | TGCTCCCACCTCCACCTGCCCCACTCACCACCTCTGCTAGTTCCAGACA | |
| | CCTCCCAAGCACGCAGCAATGCAGCTCAAAACGCTTAGCCTAGCCACA | |
| | CCCCCACGGGAAACAGCAGTGATTAACCTTTAGCAATAAACGAAAGTTT | |
| | AACTAAGCTATACTAACCCCAGGGTTGGTCAATTTCGTGCCAGCCACAC | |
| | CCTGGAGCTAGCAAAAAAAA | |
| 12 | TAGTTATTAATAGTAATCAATTACGGGGTCATTAGTTCATAGCCCATATA | 237 |
| Ad5-Pan-CoV | TGGAGTTCCGCGTTACATAACTTACGGTAAATGGCCCGCCTGGCTGAC | |
| Spike-NSP6- | CGCCCAACGACCCCCGCCCATTGACGTCAATAATGACGTATGTTCCCAT | |
| NSP7-NSP8 | AGTAACGCCAATAGGGACTTTCCATTGACGTCAATGGGTGGAGTATTTA | |
| | CGGTAAACTGCCCACTTGGCAGTACATCAAGTGTATCATATGCCAAGTA | |
| | CGCCCCCTATTGACGTCAATGACGGTAAATGGCCCGCCTGGCATTATG | |
| | CCCAGTACATGACCTTATGGGACTTTCCTACTTGGCAGTACATCTACGT | |
| | ATTAGTCATCGCTATTACCATGGTGATGCGGTTTTGGCAGTACATCAAT | |
| | GGGCGTGGATAGCGGTTTGACTCACGGGGATTTCCAAGTCTCCACCCC | |
| | ATTGACGTCAATGGGAGTTTGTTTTGGCACCAAAATCAACGGGACTTTC | |
| | CAAAATGTCGTAACAACTCCGCCCCATTGACGCAAATGGGCGGTAGGC | |
| | GTGTACGGTGGGAGGTCTATATAAGCAGAGCTGGTTTAGTGAACCGTC | |
| | AGATCGAGAATAAACTAGTATTCTTCTGGTCCCCACAGACTCAGAGAGA | |
| | ACCCGCCACCATGTTCGTGTTCCTGGTGCTGCTGCCCCTGGTGAGCAG | |
| | CCAGTGCGTGAACCTGACCACCAGGACCCAGCTGCCCCCCGCCTACA | |
| | CCAACAGCTTCACCAGGGGCGTGTACTACCCCGACAAGGTGTTCAGGA | |
| | GCAGCGTGCTGCACAGCACCCAGGACCTGTTCCTGCCCTTCTTCAGCA | |
| | ACGTGACCTGGTTCCACGCCATCCACGTGAGCGGCACCAACGGCACCA | |
| | AGAGGTTCGACAACCCCGTGCTGCCCTTCAACGACGGCGTGTACTTCG | |
| | CCAGCACCGAGAAGAGCAACATCATCAGGGGCTGGATCTTCGGCACCA | |
| | CCCTGGACAGCAAGACCCAGAGCCTGCTGATCGTGAACAACGCCACCA | |
| | ACGTGGTGATCAAGGTGTGCGAGTTCCAGTTCTGCAACGACCCCTTCC | |
| | TGGGCGTGTACTACCACAAGAACAACAAGAGCTGGATGGAGAGCGAGT | |
| | TCAGGGTGTACAGCAGCGCCAACAACTGCACCTTCGAGTACGTGAGCC | |
| | AGCCCTTCCTGATGGACCTGGAGGGCAAGCAGGGCAACTTCAAGAACC | |
| | TGAGGGAGTTCGTGTTCAAGAACATCGACGGCTACTTCAAGATCTACAG | |
| | CAAGCACACCCCCATCAACCTGGTGAGGGACCTGCCCCAGGGCTTCAG | |
| | CGCCCTGGAGCCCCTGGTGGACCTGCCCATCGGCATCAACATCACCAG | |
| | GTTCCAGACCCTGCTGGCCCTGCACAGGAGCTACCTGACCCCCGGCG | |
| | ACAGCAGCAGCGGCTGGACCGCCGGCGCCGCCGCCTACTACGTGGGC | |
| | TACCTGCAGCCCAGGACCTTCCTGCTGAAGTACAACGAGAACGGCACC | |
| | ATCACCGACGCCGTGGACTGCGCCCTGGACCCCCTGAGCGAGACCAA | |
| | GTGCACCCTGAAGAGCTTCACCGTGGAGAAGGGCATCTACCAGACCAG | |
| | CAACTTCAGGGTGCAGCCCACCGAGAGCATCGTGAGGTTCCCCAACAT | |
| | CACCAACCTGTGCCCCTTCGGCGAGGTGTTCAACGCCACCAGGTTCGC | |
| | CAGCGTGTACGCCTGGAACAGGAAGAGGATCAGCAACTGCGTGGCCG | |
| | ACTACAGCGTGCTGTACAACAGCGCCAGCTTCAGCACCTTCAAGTGCT | |
| | ACGGCGTGAGCCCCACCAAGCTGAACGACCTGTGCTTCACCAACGTGT | |
| | ACGCCGACAGCTTCGTGATCAGGGGCGACGAGGTGAGGCAGATCGCC | |
| | CCCGGCCAGACCGGCAAGATCGCCGACTACAACTACAAGCTGCCCGA | |
| | CGACTTCACCGGCTGCGTGATCGCCTGGAACAGCAACAACCTGGACAG | |
| | CAAGGTGGGCGGCAACTACAACTACCTGTACAGGCTGTTCAGGAAGAG | |
| | CAACCTGAAGCCCTTCGAGAGGGACATCAGCACCGAGATCTACCAGGC | |
| | CGGCAGCACCCCCTGCAACGGCGTGGAGGGCTTCAACTGCTACTTCCC | |
| | CCTGCAGAGCTACGGCTTCCAGCCCACCAACGGCGTGGGCTACCAGC | |
| | CCTACAGGGTGGTGGTGCTGAGCTTCGAGCTGCTGCACGCCCCCGCC | |
| | ACCGTGTGCGGCCCCAAGAAGAGCACCAACCTGGTGAAGAACAAGTGC | |
| | GTGAACTTCAACTTCAACGGCCTGACCGGCACCGGCGTGCTGACCGAG | |
| | AGCAACAAGAAGTTCCTGCCCTTCCAGCAGTTCGGCAGGGACATCGCC | |
| | GACACCACCGACGCCGTGAGGGACCCCCAGACCCTGGAGATCCTGGA | |
| | CATCACCCCCTGCAGCTTCGGCGGCGTGAGCGTGATCACCCCCGGCA | |
| | CCAACACCAGCAACCAGGTGGCCGTGCTGTACCAGGACGTGAACTGCA | |
| | CCGAGGTGCCCGTGGCCATCCACGCCGACCAGCTGACCCCCACCTGG | |
| | AGGGTGTACAGCACCGGCAGCAACGTGTTCCAGACCAGGGCCGGCTG | |
| | CCTGATCGGCGCCGAGCACGTGAACAACAGCTACGAGTGCGACATCCC | |
| | CATCGGCGCCGGCATCTGCGCCAGCTACCAGACCCAGACCAACAGCC | |
| | CCAGGAGGGCCAGGAGCGTGGCCAGCCAGAGCATCATCGCCTACACC | |
| | ATGAGCCTGGGCGCCGAGAACAGCGTGGCCTACAGCAACAACAGCAT | |
| | CGCCATCCCCACCAACTTCACCATCAGCGTGACCACCGAGATCCTGCC | |
| | CGTGAGCATGACCAAGACCAGCGTGGACTGCACCATGTACATCTGCGG | |
| | CGACAGCACCGAGTGCAGCAACCTGCTGCTGCAGTACGGCAGCTTCTG | |
| | CACCCAGCTGAACAGGGCCCTGACCGGCATCGCCGTGGAGCAGGACA | |
| | AGAACACCCAGGAGGTGTTCGCCCAGGTGAAGCAGATCTACAAGACCC | |
| | CCCCCATCAAGGACTTCGGCGGCTTCAACTTCAGCCAGATCCTGCCCG | |
| | ACCCCAGCAAGCCCAGCAAGAGGAGCTTCATCGAGGACCTGCTGTTCA | |
| | ACAAGGTGACCCTGGCCGACGCCGGCTTCATCAAGCAGTACGGCGACT | |
| | GCCTGGGCGACATCGCCGCCAGGGACCTGATCTGCGCCCAGAAGTTC | |
| | AACGGCCTGACCGTGCTGCCCCCCCTGCTGACCGACGAGATGATCGC | |
| | CCAGTACACCAGCGCCCTGCTGGCCGGCACCATCACCAGCGGCTGGA | |
| | CCTTCGGCGCCGGCGCCGCCCTGCAGATCCCCTTCGCCATGCAGATG | |
| | GCCTACAGGTTCAACGGCATCGGCGTGACCCAGAACGTGCTGTACGAG | |
| | AACCAGAAGCTGATCGCCAACCAGTTCAACAGCGCCATCGGCAAGATC | |
| | CAGGACAGCCTGAGCAGCACCGCCAGCGCCCTGGGCAAGCTGCAGGA | |
| | CGTGGTGAACCAGAACGCCCAGGCCCTGAACACCCTGGTGAAGCAGC | |
| | TGAGCAGCAACTTCGGCGCCATCAGCAGCGTGCTGAACGACATCCTGA | |
| | GCAGGCTGGACCCCCCCGAGGCCGAGGTGCAGATCGACAGGCTGATC | |
| | ACCGGCAGGCTGCAGAGCCTGCAGACCTACGTGACCCAGCAGCTGAT | |
| | CAGGGCCGCCGAGATCAGGGCCAGCGCCAACCTGGCCGCCACCAAGA | |
| | TGAGCGAGTGCGTGCTGGGCCAGAGCAAGAGGGTGGACTTCTGCGGC | |
| | AAGGGCTACCACCTGATGAGCTTCCCCCAGAGCGCCCCCCACGGCGT | |
| | GGTGTTCCTGCACGTGACCTACGTGCCCGCCCAGGAGAAGAACTTCAC | |
| | CACCGCCCCCGCCATCTGCCACGACGGCAAGGCCCACTTCCCCAGGG | |
| | AGGGCGTGTTCGTGAGCAACGGCACCCACTGGTTCGTGACCCAGAGG | |
| | AACTTCTACGAGCCCCAGATCATCACCACCGACAACACCTTCGTGAGC | |
| | GGCAACTGCGACGTGGTGATCGGCATCGTGAACAACACCGTGTACGAC | |
| | CCCCTGCAGCCCGAGCTGGACAGCTTCAAGGAGGAGCTGGACAAGTA | |
| | CTTCAAGAACCACACCAGCCCCGACGTGGACCTGGGCGACATCAGCG | |
| | GCATCAACGCCAGCGTGGTGAACATCCAGAAGGAGATCGACAGGCTGA | |
| | ACGAGGTGGCCAAGAACCTGAACGAGAGCCTGATCGACCTGCAGGAG | |
| | CTGGGCAAGTACGAGCAGTACATCAAGTGGCCCTGGTACATCTGGCTG | |
| | GGCTTCATCGCCGGCCTGATCGCCATCGTGATGGTGACCATCATGCTG | |
| | TGCTGCATGACCAGCTGCTGCAGCTGCCTGAAGGGCTGCTGCAGCTGC | |
| | GGCAGCTGCTGCAAGTTCGACGAGGACGACAGCGAGCCCGTGCTGAA | |
| | GGGCGTGAAGCTGCACTACACCGGAAGCGGAGCCACGAACTTCTCTCT | |
| | GTTAAAGCAAGCAGGAGATGTTGAAGAAAACCCCGGGCCTAGCGCCGT | |
| | GAAGAGGACCATCAAGGGCACCCACCACTGGCTGCTGCTGACCATCCT | |
| | GACCAGCCTGCTGGTGCTGGTGCAGAGCACCCAGTGGAGCCTGTTCTT | |
| | CTTCCTGTACGAGAACGCCTTCCTGCCCTTCGCCATGGGCATCATCGC | |
| | CATGAGCGCCTTCGCCATGATGTTCGTGAAGCACAAGCACGCCTTCCT | |
| | GTGCCTGTTCCTGCTGCCCAGCCTGGCCACCGTGGCCTACTTCAACAT | |
| | GGTGTACATGCCCGCCAGCTGGGTGATGAGGATCATGACCTGGCTGGA | |
| | CATGGTGGACACCAGCCTGAGCGGCTTCAAGCTGAAGGACTGCGTGAT | |
| | GTACGCCAGCGCCGTGGTGCTGCTGATCCTGATGACCGCCAGGACCG | |
| | TGTACGACGACGGCGCCAGGAGGGTGTGGACCCTGATGAACGTGCTG | |
| | ACCCTGGTGTACAAGGTGTACTACGGCAACGCCCTGGACCAGGCCATC | |
| | AGCATGTGGGCCCTGATCATCAGCGTGACCAGCAACTACAGCGGCGTG | |
| | GTGACCACCGTGATGTTCCTGGCCAGGGGCATCGTGTTCATGTGCGTG | |
| | GAGTACTGCCCCATCTTCTTCATCACCGGCAACACCCTGCAGTGCATCA | |
| | TGCTGGTGTACTGCTTCCTGGGCTACTTCTGCACCTGCTACTTCGGCCT | |
| | GTTCTGCCTGCTGAACAGGTACTTCAGGCTGACCCTGGGCGTGTACGA | |
| | CTACCTGGTGAGCACCCAGGAGTTCAGGTACATGAACAGCCAGGGCCT | |
| | GCTGCCCCCCAAGAACAGCATCGACGCCTTCAAGCTGAACATCAAGCT | |
| | GCTGGGCGTGGGCGGCAAGCCCTGCATCAAGGTGGCCACCGTGCAGG | |
| | GAAGCGGAGAGGGCAGGGGAAGTCTTCTAACATGCGGGGACGTGGAG | |
| | GAAAATCCCGGCCCCAGCAAGATGAGCGACGTGAAGTGCACCAGCGT | |
| | GGTGCTGCTGAGCGTGCTGCAGCAGCTGAGGGTGGAGAGCAGCAGCA | |
| | AGCTGTGGGCCCAGTGCGTGCAGCTGCACAACGACATCCTGCTGGCC | |
| | AAGGACACCACCGAGGCCTTCGAGAAGATGGTGAGCCTGCTGAGCGT | |
| | GCTGCTGAGCATGCAGGGCGCCGTGGACATCAACAAGCTGTGCGAGG | |
| | AGATGCTGGACAACAGGGCCACCCTGCAGGGAAGCGGACAGTGTACT | |
| | AATTATGCTCTCTTGAAATTGGCTGGAGATGTTGAGAGCAACCCAGGTC | |
| | CCGCCATCGCCAGCGAGTTCAGCAGCCTGCCCAGCTACGCCGCCTTC | |
| | GCCACCGCCCAGGAGGCCTACGAGCAGGCCGTGGCCAACGGCGACA | |
| | GCGAGGTGGTGCTGAAGAAGCTGAAGAAGAGCCTGAACGTGGCCAAG | |
| | AGCGAGTTCGACAGGGACGCCGCCATGCAGAGGAAGCTGGAGAAGAT | |
| | GGCCGACCAGGCCATGACCCAGATGTACAAGCAGGCCAGGAGCGAGG | |
| | ACAAGAGGGCCAAGGTGACCAGCGCCATGCAGACCATGCTGTTCACCA | |
| | TGCTGAGGAAGCTGGACAACGACGCCCTGAACAACATCATCAACAACG | |
| | CCAGGGACGGCTGCGTGCCCCTGAACATCATCCCCCTGACCACCGCC | |
| | GCCAAGCTGATGGTGGTGATCCCCGACTACAACACCTACAAGAACACC | |
| | TGCGACGGCACCACCTTCACCTACGCCAGCGCCCTGTGGGAGATCCA | |
| | GCAGGTGGTGGACGCCGACAGCAAGATCGTGCAGCTGAGCGAGATCA | |
| | GCATGGACAACAGCCCCAACCTGGCCTGGCCCCTGATCGTGACCGCC | |
| | CTGAGGGCCAACAGCGCCGTGAAGCTGCAGTGATGACTCGAGCTGGT | |
| | ACTGCATGCACGCAATGCTAGCTGCCCCTTTCCCGTCCTGGGTACCCC | |
| | GAGTCTCCCCCGACCTCGGGTCCCAGGTATGCTCCCACCTCCACCTGC | |
| | CCCACTCACCACCTCTGCTAGTTCCAGACACCTCCCAAGCACGCAGCA | |
| | ATGCAGCTCAAAACGCTTAGCCTAGCCACACCCCCACGGGAAACAGCA | |
| | GTGATTAACCTTTAGCAATAAACGAAAGTTTAACTAAGCTATACTAACCC | |
| | CAGGGTTGGTCAATTTCGTGCCAGCCACACCCTGGAGCTAGCAAAAAA | |
| | AA | |
| 13 | TAGTTATTAATAGTAATCAATTACGGGGTCATTAGTTCATAGCCCATATA | 298 |
| Ad5-Pan-CoV | TGGAGTTCCGCGTTACATAACTTACGGTAAATGGCCCGCCTGGCTGAC | |
| HexaPro- | CGCCCAACGACCCCCGCCCATTGACGTCAATAATGACGTATGTTCCCAT | |
| NSP6-NSP7- | AGTAACGCCAATAGGGACTTTCCATTGACGTCAATGGGTGGAGTATTTA | |
| NSP8 | CGGTAAACTGCCCACTTGGCAGTACATCAAGTGTATCATATGCCAAGTA | |
| | CGCCCCCTATTGACGTCAATGACGGTAAATGGCCCGCCTGGCATTATG | |
| | CCCAGTACATGACCTTATGGGACTTTCCTACTTGGCAGTACATCTACGT | |
| | ATTAGTCATCGCTATTACCATGGTGATGCGGTTTTGGCAGTACATCAAT | |
| | GGGCGTGGATAGCGGTTTGACTCACGGGGATTTCCAAGTCTCCACCCC | |
| | ATTGACGTCAATGGGAGTTTGTTTTGGCACCAAAATCAACGGGACTTTC | |
| | CAAAATGTCGTAACAACTCCGCCCCATTGACGCAAATGGGCGGTAGGC | |
| | GTGTACGGTGGGAGGTCTATATAAGCAGAGCTGGTTTAGTGAACCGTC | |
| | AGATCGAGAATAAACTAGTATTCTTCTGGTCCCCACAGACTCAGAGAGA | |
| | ACCCGCCACCATGTTCGTGTTCCTGGTGCTGCTGCCCCTGGTGAGCAG | |
| | CCAGTGCGTGAACCTGACCACCAGGACCCAGCTGCCCCCCGCCTACA | |
| | CCAACAGCTTCACCAGGGGCGTGTACTACCCCGACAAGGTGTTCAGGA | |
| | GCAGCGTGCTGCACAGCACCCAGGACCTGTTCCTGCCCTTCTTCAGCA | |
| | ACGTGACCTGGTTCCACGCCATCCACGTGAGCGGCACCAACGGCACCA | |
| | AGAGGTTCGACAACCCCGTGCTGCCCTTCAACGACGGCGTGTACTTCG | |
| | CCAGCACCGAGAAGAGCAACATCATCAGGGGCTGGATCTTCGGCACCA | |
| | CCCTGGACAGCAAGACCCAGAGCCTGCTGATCGTGAACAACGCCACCA | |
| | ACGTGGTGATCAAGGTGTGCGAGTTCCAGTTCTGCAACGACCCCTTCC | |
| | TGGGCGTGTACTACCACAAGAACAACAAGAGCTGGATGGAGAGCGAGT | |
| | TCAGGGTGTACAGCAGCGCCAACAACTGCACCTTCGAGTACGTGAGCC | |
| | AGCCCTTCCTGATGGACCTGGAGGGCAAGCAGGGCAACTTCAAGAACC | |
| | TGAGGGAGTTCGTGTTCAAGAACATCGACGGCTACTTCAAGATCTACAG | |
| | CAAGCACACCCCCATCAACCTGGTGAGGGACCTGCCCCAGGGCTTCAG | |
| | CGCCCTGGAGCCCCTGGTGGACCTGCCCATCGGCATCAACATCACCAG | |
| | GTTCCAGACCCTGCTGGCCCTGCACAGGAGCTACCTGACCCCCGGCG | |
| | ACAGCAGCAGCGGCTGGACCGCCGGCGCCGCCGCCTACTACGTGGGC | |
| | TACCTGCAGCCCAGGACCTTCCTGCTGAAGTACAACGAGAACGGCACC | |
| | ATCACCGACGCCGTGGACTGCGCCCTGGACCCCCTGAGCGAGACCAA | |
| | GTGCACCCTGAAGAGCTTCACCGTGGAGAAGGGCATCTACCAGACCAG | |
| | CAACTTCAGGGTGCAGCCCACCGAGAGCATCGTGAGGTTCCCCAACAT | |
| | CACCAACCTGTGCCCCTTCGGCGAGGTGTTCAACGCCACCAGGTTCGC | |
| | CAGCGTGTACGCCTGGAACAGGAAGAGGATCAGCAACTGCGTGGCCG | |
| | ACTACAGCGTGCTGTACAACAGCGCCAGCTTCAGCACCTTCAAGTGCT | |
| | ACGGCGTGAGCCCCACCAAGCTGAACGACCTGTGCTTCACCAACGTGT | |
| | ACGCCGACAGCTTCGTGATCAGGGGCGACGAGGTGAGGCAGATCGCC | |
| | CCCGGCCAGACCGGCAAGATCGCCGACTACAACTACAAGCTGCCCGA | |
| | CGACTTCACCGGCTGCGTGATCGCCTGGAACAGCAACAACCTGGACAG | |
| | CAAGGTGGGCGGCAACTACAACTACCTGTACAGGCTGTTCAGGAAGAG | |
| | CAACCTGAAGCCCTTCGAGAGGGACATCAGCACCGAGATCTACCAGGC | |
| | CGGCAGCACCCCCTGCAACGGCGTGGAGGGCTTCAACTGCTACTTCCC | |
| | CCTGCAGAGCTACGGCTTCCAGCCCACCAACGGCGTGGGCTACCAGC | |
| | CCTACAGGGTGGTGGTGCTGAGCTTCGAGCTGCTGCACGCCCCCGCC | |
| | ACCGTGTGCGGCCCCAAGAAGAGCACCAACCTGGTGAAGAACAAGTGC | |
| | GTGAACTTCAACTTCAACGGCCTGACCGGCACCGGCGTGCTGACCGAG | |
| | AGCAACAAGAAGTTCCTGCCCTTCCAGCAGTTCGGCAGGGACATCGCC | |
| | GACACCACCGACGCCGTGAGGGACCCCCAGACCCTGGAGATCCTGGA | |
| | CATCACCCCCTGCAGCTTCGGCGGCGTGAGCGTGATCACCCCCGGCA | |
| | CCAACACCAGCAACCAGGTGGCCGTGCTGTACCAGGACGTGAACTGCA | |
| | CCGAGGTGCCCGTGGCCATCCACGCCGACCAGCTGACCCCCACCTGG | |
| | AGGGTGTACAGCACCGGCAGCAACGTGTTCCAGACCAGGGCCGGCTG | |
| | CCTGATCGGCGCCGAGCACGTGAACAACAGCTACGAGTGCGACATCCC | |
| | CATCGGCGCCGGCATCTGCGCCAGCTACCAGACCCAGACCAACAGCC | |
| | CCGGCAGCGCCAGCAGCGTGGCCAGCCAGAGCATCATCGCCTACACC | |
| | ATGAGCCTGGGCGCCGAGAACAGCGTGGCCTACAGCAACAACAGCAT | |
| | CGCCATCCCCACCAACTTCACCATCAGCGTGACCACCGAGATCCTGCC | |
| | CGTGAGCATGACCAAGACCAGCGTGGACTGCACCATGTACATCTGCGG | |
| | CGACAGCACCGAGTGCAGCAACCTGCTGCTGCAGTACGGCAGCTTCTG | |
| | CACCCAGCTGAACAGGGCCCTGACCGGCATCGCCGTGGAGCAGGACA | |
| | AGAACACCCAGGAGGTGTTCGCCCAGGTGAAGCAGATCTACAAGACCC | |
| | CCCCCATCAAGGACTTCGGCGGCTTCAACTTCAGCCAGATCCTGCCCG | |
| | ACCCCAGCAAGCCCAGCAAGAGGAGCCCCATCGAGGACCTGCTGTTCA | |
| | ACAAGGTGACCCTGGCCGACGCCGGCTTCATCAAGCAGTACGGCGACT | |
| | GCCTGGGCGACATCGCCGCCAGGGACCTGATCTGCGCCCAGAAGTTC | |
| | AACGGCCTGACCGTGCTGCCCCCCCTGCTGACCGACGAGATGATCGC | |
| | CCAGTACACCAGCGCCCTGCTGGCCGGCACCATCACCAGCGGCTGGA | |
| | CCTTCGGCGCCGGCCCCGCCCTGCAGATCCCCTTCCCCATGCAGATG | |
| | GCCTACAGGTTCAACGGCATCGGCGTGACCCAGAACGTGCTGTACGAG | |
| | AACCAGAAGCTGATCGCCAACCAGTTCAACAGCGCCATCGGCAAGATC | |
| | CAGGACAGCCTGAGCAGCACCCCCAGCGCCCTGGGCAAGCTGCAGGA | |
| | CGTGGTGAACCAGAACGCCCAGGCCCTGAACACCCTGGTGAAGCAGC | |
| | TGAGCAGCAACTTCGGCGCCATCAGCAGCGTGCTGAACGACATCCTGA | |
| | GCAGGCTGGACCCCCCCGAGGCCGAGGTGCAGATCGACAGGCTGATC | |
| | ACCGGCAGGCTGCAGAGCCTGCAGACCTACGTGACCCAGCAGCTGAT | |
| | CAGGGCCGCCGAGATCAGGGCCAGCGCCAACCTGGCCGCCACCAAGA | |
| | TGAGCGAGTGCGTGCTGGGCCAGAGCAAGAGGGTGGACTTCTGCGGC | |
| | AAGGGCTACCACCTGATGAGCTTCCCCCAGAGCGCCCCCCACGGCGT | |
| | GGTGTTCCTGCACGTGACCTACGTGCCCGCCCAGGAGAAGAACTTCAC | |
| | CACCGCCCCCGCCATCTGCCACGACGGCAAGGCCCACTTCCCCAGGG | |
| | AGGGCGTGTTCGTGAGCAACGGCACCCACTGGTTCGTGACCCAGAGG | |
| | AACTTCTACGAGCCCCAGATCATCACCACCGACAACACCTTCGTGAGC | |
| | GGCAACTGCGACGTGGTGATCGGCATCGTGAACAACACCGTGTACGAC | |
| | CCCCTGCAGCCCGAGCTGGACAGCTTCAAGGAGGAGCTGGACAAGTA | |
| | CTTCAAGAACCACACCAGCCCCGACGTGGACCTGGGCGACATCAGCG | |
| | GCATCAACGCCAGCGTGGTGAACATCCAGAAGGAGATCGACAGGCTGA | |
| | ACGAGGTGGCCAAGAACCTGAACGAGAGCCTGATCGACCTGCAGGAG | |
| | CTGGGCAAGTACGAGCAGTACATCAAGTGGCCCTGGTACATCTGGCTG | |
| | GGCTTCATCGCCGGCCTGATCGCCATCGTGATGGTGACCATCATGCTG | |
| | TGCTGCATGACCAGCTGCTGCAGCTGCCTGAAGGGCTGCTGCAGCTGC | |
| | GGCAGCTGCTGCAAGTTCGACGAGGACGACAGCGAGCCCGTGCTGAA | |
| | GGGCGTGAAGCTGCACTACACCGGAAGCGGAGCCACGAACTTCTCTCT | |
| | GTTAAAGCAAGCAGGAGATGTTGAAGAAAACCCCGGGCCTAGCGCCGT | |
| | GAAGAGGACCATCAAGGGCACCCACCACTGGCTGCTGCTGACCATCCT | |
| | GACCAGCCTGCTGGTGCTGGTGCAGAGCACCCAGTGGAGCCTGTTCTT | |
| | CTTCCTGTACGAGAACGCCTTCCTGCCCTTCGCCATGGGCATCATCGC | |
| | CATGAGCGCCTTCGCCATGATGTTCGTGAAGCACAAGCACGCCTTCCT | |
| | GTGCCTGTTCCTGCTGCCCAGCCTGGCCACCGTGGCCTACTTCAACAT | |
| | GGTGTACATGCCCGCCAGCTGGGTGATGAGGATCATGACCTGGCTGGA | |
| | CATGGTGGACACCAGCCTGAGCGGCTTCAAGCTGAAGGACTGCGTGAT | |
| | GTACGCCAGCGCCGTGGTGCTGCTGATCCTGATGACCGCCAGGACCG | |
| | TGTACGACGACGGCGCCAGGAGGGTGTGGACCCTGATGAACGTGCTG | |
| | ACCCTGGTGTACAAGGTGTACTACGGCAACGCCCTGGACCAGGCCATC | |
| | AGCATGTGGGCCCTGATCATCAGCGTGACCAGCAACTACAGCGGCGTG | |
| | GTGACCACCGTGATGTTCCTGGCCAGGGGCATCGTGTTCATGTGCGTG | |
| | GAGTACTGCCCCATCTTCTTCATCACCGGCAACACCCTGCAGTGCATCA | |
| | TGCTGGTGTACTGCTTCCTGGGCTACTTCTGCACCTGCTACTTCGGCCT | |
| | GTTCTGCCTGCTGAACAGGTACTTCAGGCTGACCCTGGGCGTGTACGA | |
| | CTACCTGGTGAGCACCCAGGAGTTCAGGTACATGAACAGCCAGGGCCT | |
| | GCTGCCCCCCAAGAACAGCATCGACGCCTTCAAGCTGAACATCAAGCT | |
| | GCTGGGCGTGGGCGGCAAGCCCTGCATCAAGGTGGCCACCGTGCAGG | |
| | GAAGCGGAGAGGGCAGGGGAAGTCTTCTAACATGCGGGGACGTGGAG | |
| | GAAAATCCCGGCCCCAGCAAGATGAGCGACGTGAAGTGCACCAGCGT | |
| | GGTGCTGCTGAGCGTGCTGCAGCAGCTGAGGGTGGAGAGCAGCAGCA | |
| | AGCTGTGGGCCCAGTGCGTGCAGCTGCACAACGACATCCTGCTGGCC | |
| | AAGGACACCACCGAGGCCTTCGAGAAGATGGTGAGCCTGCTGAGCGT | |
| | GCTGCTGAGCATGCAGGGCGCCGTGGACATCAACAAGCTGTGCGAGG | |
| | AGATGCTGGACAACAGGGCCACCCTGCAGGGAAGCGGACAGTGTACT | |
| | AATTATGCTCTCTTGAAATTGGCTGGAGATGTTGAGAGCAACCCAGGTC | |
| | CCGCCATCGCCAGCGAGTTCAGCAGCCTGCCCAGCTACGCCGCCTTC | |
| | GCCACCGCCCAGGAGGCCTACGAGCAGGCCGTGGCCAACGGCGACA | |
| | GCGAGGTGGTGCTGAAGAAGCTGAAGAAGAGCCTGAACGTGGCCAAG | |
| | AGCGAGTTCGACAGGGACGCCGCCATGCAGAGGAAGCTGGAGAAGAT | |
| | GGCCGACCAGGCCATGACCCAGATGTACAAGCAGGCCAGGAGCGAGG | |
| | ACAAGAGGGCCAAGGTGACCAGCGCCATGCAGACCATGCTGTTCACCA | |
| | TGCTGAGGAAGCTGGACAACGACGCCCTGAACAACATCATCAACAACG | |
| | CCAGGGACGGCTGCGTGCCCCTGAACATCATCCCCCTGACCACCGCC | |
| | GCCAAGCTGATGGTGGTGATCCCCGACTACAACACCTACAAGAACACC | |
| | TGCGACGGCACCACCTTCACCTACGCCAGCGCCCTGTGGGAGATCCA | |
| | GCAGGTGGTGGACGCCGACAGCAAGATCGTGCAGCTGAGCGAGATCA | |
| | GCATGGACAACAGCCCCAACCTGGCCTGGCCCCTGATCGTGACCGCC | |
| | CTGAGGGCCAACAGCGCCGTGAAGCTGCAGTGATGACTCGAGCTGGT | |
| | ACTGCATGCACGCAATGCTAGCTGCCCCTTTCCCGTCCTGGGTACCCC | |
| | GAGTCTCCCCCGACCTCGGGTCCCAGGTATGCTCCCACCTCCACCTGC | |
| | CCCACTCACCACCTCTGCTAGTTCCAGACACCTCCCAAGCACGCAGCA | |
| | ATGCAGCTCAAAACGCTTAGCCTAGCCACACCCCCACGGGAAACAGCA | |
| | GTGATTAACCTTTAGCAATAAACGAAAGTTTAACTAAGCTATACTAACCC | |
| | CAGGGTTGGTCAATTTCGTGCCAGCCACACCCTGGAGCTAGCAAAAAA | |
| | AA | |
| 14 | TAGTTATTAATAGTAATCAATTACGGGGTCATTAGTTCATAGCCCATATA | 299 |
| Ad5-Pan-CoV | TGGAGTTCCGCGTTACATAACTTACGGTAAATGGCCCGCCTGGCTGAC | |
| Spike-NSP9- | CGCCCAACGACCCCCGCCCATTGACGTCAATAATGACGTATGTTCCCAT | |
| NSP10- | AGTAACGCCAATAGGGACTTTCCATTGACGTCAATGGGTGGAGTATTTA | |
| NSP13 | CGGTAAACTGCCCACTTGGCAGTACATCAAGTGTATCATATGCCAAGTA | |
| | CGCCCCCTATTGACGTCAATGACGGTAAATGGCCCGCCTGGCATTATG | |
| | CCCAGTACATGACCTTATGGGACTTTCCTACTTGGCAGTACATCTACGT | |
| | ATTAGTCATCGCTATTACCATGGTGATGCGGTTTTGGCAGTACATCAAT | |
| | GGGCGTGGATAGCGGTTTGACTCACGGGGATTTCCAAGTCTCCACCCC | |
| | ATTGACGTCAATGGGAGTTTGTTTTGGCACCAAAATCAACGGGACTTTC | |
| | CAAAATGTCGTAACAACTCCGCCCCATTGACGCAAATGGGCGGTAGGC | |
| | GTGTACGGTGGGAGGTCTATATAAGCAGAGCTGGTTTAGTGAACCGTC | |
| | AGATCGAGAATAAACTAGTATTCTTCTGGTCCCCACAGACTCAGAGAGA | |
| | ACCCGCCACCATGTTCGTGTTCCTGGTGCTGCTGCCCCTGGTGAGCAG | |
| | CCAGTGCGTGAACCTGACCACCAGGACCCAGCTGCCCCCCGCCTACA | |
| | CCAACAGCTTCACCAGGGGCGTGTACTACCCCGACAAGGTGTTCAGGA | |
| | GCAGCGTGCTGCACAGCACCCAGGACCTGTTCCTGCCCTTCTTCAGCA | |
| | ACGTGACCTGGTTCCACGCCATCCACGTGAGCGGCACCAACGGCACCA | |
| | AGAGGTTCGACAACCCCGTGCTGCCCTTCAACGACGGCGTGTACTTCG | |
| | CCAGCACCGAGAAGAGCAACATCATCAGGGGCTGGATCTTCGGCACCA | |
| | CCCTGGACAGCAAGACCCAGAGCCTGCTGATCGTGAACAACGCCACCA | |
| | ACGTGGTGATCAAGGTGTGCGAGTTCCAGTTCTGCAACGACCCCTTCC | |
| | TGGGCGTGTACTACCACAAGAACAACAAGAGCTGGATGGAGAGCGAGT | |
| | TCAGGGTGTACAGCAGCGCCAACAACTGCACCTTCGAGTACGTGAGCC | |
| | AGCCCTTCCTGATGGACCTGGAGGGCAAGCAGGGCAACTTCAAGAACC | |
| | TGAGGGAGTTCGTGTTCAAGAACATCGACGGCTACTTCAAGATCTACAG | |
| | CAAGCACACCCCCATCAACCTGGTGAGGGACCTGCCCCAGGGCTTCAG | |
| | CGCCCTGGAGCCCCTGGTGGACCTGCCCATCGGCATCAACATCACCAG | |
| | GTTCCAGACCCTGCTGGCCCTGCACAGGAGCTACCTGACCCCCGGCG | |
| | ACAGCAGCAGCGGCTGGACCGCCGGCGCCGCCGCCTACTACGTGGGC | |
| | TACCTGCAGCCCAGGACCTTCCTGCTGAAGTACAACGAGAACGGCACC | |
| | ATCACCGACGCCGTGGACTGCGCCCTGGACCCCCTGAGCGAGACCAA | |
| | GTGCACCCTGAAGAGCTTCACCGTGGAGAAGGGCATCTACCAGACCAG | |
| | CAACTTCAGGGTGCAGCCCACCGAGAGCATCGTGAGGTTCCCCAACAT | |
| | CACCAACCTGTGCCCCTTCGGCGAGGTGTTCAACGCCACCAGGTTCGC | |
| | CAGCGTGTACGCCTGGAACAGGAAGAGGATCAGCAACTGCGTGGCCG | |
| | ACTACAGCGTGCTGTACAACAGCGCCAGCTTCAGCACCTTCAAGTGCT | |
| | ACGGCGTGAGCCCCACCAAGCTGAACGACCTGTGCTTCACCAACGTGT | |
| | ACGCCGACAGCTTCGTGATCAGGGGCGACGAGGTGAGGCAGATCGCC | |
| | CCCGGCCAGACCGGCAAGATCGCCGACTACAACTACAAGCTGCCCGA | |
| | CGACTTCACCGGCTGCGTGATCGCCTGGAACAGCAACAACCTGGACAG | |
| | CAAGGTGGGCGGCAACTACAACTACCTGTACAGGCTGTTCAGGAAGAG | |
| | CAACCTGAAGCCCTTCGAGAGGGACATCAGCACCGAGATCTACCAGGC | |
| | CGGCAGCACCCCCTGCAACGGCGTGGAGGGCTTCAACTGCTACTTCCC | |
| | CCTGCAGAGCTACGGCTTCCAGCCCACCAACGGCGTGGGCTACCAGC | |
| | CCTACAGGGTGGTGGTGCTGAGCTTCGAGCTGCTGCACGCCCCCGCC | |
| | ACCGTGTGCGGCCCCAAGAAGAGCACCAACCTGGTGAAGAACAAGTGC | |
| | GTGAACTTCAACTTCAACGGCCTGACCGGCACCGGCGTGCTGACCGAG | |
| | AGCAACAAGAAGTTCCTGCCCTTCCAGCAGTTCGGCAGGGACATCGCC | |
| | GACACCACCGACGCCGTGAGGGACCCCCAGACCCTGGAGATCCTGGA | |
| | CATCACCCCCTGCAGCTTCGGCGGCGTGAGCGTGATCACCCCCGGCA | |
| | CCAACACCAGCAACCAGGTGGCCGTGCTGTACCAGGACGTGAACTGCA | |
| | CCGAGGTGCCCGTGGCCATCCACGCCGACCAGCTGACCCCCACCTGG | |
| | AGGGTGTACAGCACCGGCAGCAACGTGTTCCAGACCAGGGCCGGCTG | |
| | CCTGATCGGCGCCGAGCACGTGAACAACAGCTACGAGTGCGACATCCC | |
| | CATCGGCGCCGGCATCTGCGCCAGCTACCAGACCCAGACCAACAGCC | |
| | CCAGGAGGGCCAGGAGCGTGGCCAGCCAGAGCATCATCGCCTACACC | |
| | ATGAGCCTGGGCGCCGAGAACAGCGTGGCCTACAGCAACAACAGCAT | |
| | CGCCATCCCCACCAACTTCACCATCAGCGTGACCACCGAGATCCTGCC | |
| | CGTGAGCATGACCAAGACCAGCGTGGACTGCACCATGTACATCTGCGG | |
| | CGACAGCACCGAGTGCAGCAACCTGCTGCTGCAGTACGGCAGCTTCTG | |
| | CACCCAGCTGAACAGGGCCCTGACCGGCATCGCCGTGGAGCAGGACA | |
| | AGAACACCCAGGAGGTGTTCGCCCAGGTGAAGCAGATCTACAAGACCC | |
| | CCCCCATCAAGGACTTCGGCGGCTTCAACTTCAGCCAGATCCTGCCCG | |
| | ACCCCAGCAAGCCCAGCAAGAGGAGCTTCATCGAGGACCTGCTGTTCA | |
| | ACAAGGTGACCCTGGCCGACGCCGGCTTCATCAAGCAGTACGGCGACT | |
| | GCCTGGGCGACATCGCCGCCAGGGACCTGATCTGCGCCCAGAAGTTC | |
| | AACGGCCTGACCGTGCTGCCCCCCCTGCTGACCGACGAGATGATCGC | |
| | CCAGTACACCAGCGCCCTGCTGGCCGGCACCATCACCAGCGGCTGGA | |
| | CCTTCGGCGCCGGCGCCGCCCTGCAGATCCCCTTCGCCATGCAGATG | |
| | GCCTACAGGTTCAACGGCATCGGCGTGACCCAGAACGTGCTGTACGAG | |
| | AACCAGAAGCTGATCGCCAACCAGTTCAACAGCGCCATCGGCAAGATC | |
| | CAGGACAGCCTGAGCAGCACCGCCAGCGCCCTGGGCAAGCTGCAGGA | |
| | CGTGGTGAACCAGAACGCCCAGGCCCTGAACACCCTGGTGAAGCAGC | |
| | TGAGCAGCAACTTCGGCGCCATCAGCAGCGTGCTGAACGACATCCTGA | |
| | GCAGGCTGGACCCCCCCGAGGCCGAGGTGCAGATCGACAGGCTGATC | |
| | ACCGGCAGGCTGCAGAGCCTGCAGACCTACGTGACCCAGCAGCTGAT | |
| | CAGGGCCGCCGAGATCAGGGCCAGCGCCAACCTGGCCGCCACCAAGA | |
| | TGAGCGAGTGCGTGCTGGGCCAGAGCAAGAGGGTGGACTTCTGCGGC | |
| | AAGGGCTACCACCTGATGAGCTTCCCCCAGAGCGCCCCCCACGGCGT | |
| | GGTGTTCCTGCACGTGACCTACGTGCCCGCCCAGGAGAAGAACTTCAC | |
| | CACCGCCCCCGCCATCTGCCACGACGGCAAGGCCCACTTCCCCAGGG | |
| | AGGGCGTGTTCGTGAGCAACGGCACCCACTGGTTCGTGACCCAGAGG | |
| | AACTTCTACGAGCCCCAGATCATCACCACCGACAACACCTTCGTGAGC | |
| | GGCAACTGCGACGTGGTGATCGGCATCGTGAACAACACCGTGTACGAC | |
| | CCCCTGCAGCCCGAGCTGGACAGCTTCAAGGAGGAGCTGGACAAGTA | |
| | CTTCAAGAACCACACCAGCCCCGACGTGGACCTGGGCGACATCAGCG | |
| | GCATCAACGCCAGCGTGGTGAACATCCAGAAGGAGATCGACAGGCTGA | |
| | ACGAGGTGGCCAAGAACCTGAACGAGAGCCTGATCGACCTGCAGGAG | |
| | CTGGGCAAGTACGAGCAGTACATCAAGTGGCCCTGGTACATCTGGCTG | |
| | GGCTTCATCGCCGGCCTGATCGCCATCGTGATGGTGACCATCATGCTG | |
| | TGCTGCATGACCAGCTGCTGCAGCTGCCTGAAGGGCTGCTGCAGCTGC | |
| | GGCAGCTGCTGCAAGTTCGACGAGGACGACAGCGAGCCCGTGCTGAA | |
| | GGGCGTGAAGCTGCACTACACCGGAAGCGGAGCCACGAACTTCTCTCT | |
| | GTTAAAGCAAGCAGGAGATGTTGAAGAAAACCCCGGGCCTAACAACGA | |
| | GCTGAGCCCCGTGGCCCTGAGGCAGATGAGCTGCGCCGCCGGCACCA | |
| | CCCAGACCGCCTGCACCGACGACAACGCCCTGGCCTACTACAACACCA | |
| | CCAAGGGCGGCAGGTTCGTGCTGGCCCTGCTGAGCGACCTGCAGGAC | |
| | CTGAAGTGGGCCAGGTTCCCCAAGAGCGACGGCACCGGCACCATCTA | |
| | CACCGAGCTGGAGCCCCCCTGCAGGTTCGTGACCGACACCCCCAAGG | |
| | GCCCCAAGGTGAAGTACCTGTACTTCATCAAGGGCCTGAACAACCTGA | |
| | ACAGGGGCATGGTGCTGGGCAGCCTGGCCGCCACCGTGAGGCTGCAG | |
| | GGAAGCGGAGAGGGCAGGGGAAGTCTTCTAACATGCGGGGACGTGGA | |
| | GGAAAATCCCGGCCCCGCCGGCAACGCCACCGAGGTGCCCGCCAACA | |
| | GCACCGTGCTGAGCTTCTGCGCCTTCGCCGTGGACGCCGCCAAGGCC | |
| | TACAAGGACTACCTGGCCAGCGGCGGCCAGCCCATCACCAACTGCGT | |
| | GAAGATGCTGTGCACCCACACCGGCACCGGCCAGGCCATCACCGTGA | |
| | CCCCCGAGGCCAACATGGACCAGGAGAGCTTCGGCGGCGCCAGCTGC | |
| | TGCCTGTACTGCAGGTGCCACATCGACCACCCCAACCCCAAGGGCTTC | |
| | TGCGACCTGAAGGGCAAGTACGTGCAGATCCCCACCACCTGCGCCAAC | |
| | GACCCCGTGGGCTTCACCCTGAAGAACACCGTGTGCACCGTGTGCGG | |
| | CATGTGGAAGGGCTACGGCTGCAGCTGCGACCAGCTGAGGGAGCCCA | |
| | TGCTGCAGGGAAGCGGACAGTGTACTAATTATGCTCTCTTGAAATTGGC | |
| | TGGAGATGTTGAGAGCAACCCAGGTCCCGCCGTGGGCGCCTGCGTGC | |
| | TGTGCAACAGCCAGACCAGCCTGAGGTGCGGCGCCTGCATCAGGAGG | |
| | CCCTTCCTGTGCTGCAAGTGCTGCTACGACCACGTGATCAGCACCAGC | |
| | CACAAGCTGGTGCTGAGCGTGAACCCCTACGTGTGCAACGCCCCCGG | |
| | CTGCGACGTGACCGACGTGACCCAGCTGTACCTGGGCGGCATGAGCT | |
| | ACTACTGCAAGAGCCACAAGCCCCCCATCAGCTTCCCCCTGTGCGCCA | |
| | ACGGCCAGGTGTTCGGCCTGTACAAGAACACCTGCGTGGGCAGCGAC | |
| | AACGTGACCGACTTCAACGCCATCGCCACCTGCGACTGGACCAACGCC | |
| | GGCGACTACATCCTGGCCAACACCTGCACCGAGAGGCTGAAGCTGTTC | |
| | GCCGCCGAGACCCTGAAGGCCACCGAGGAGACCTTCAAGCTGAGCTA | |
| | CGGCATCGCCACCGTGAGGGAGGTGCTGAGCGACAGGGAGCTGCACC | |
| | TGAGCTGGGAGGTGGGCAAGCCCAGGCCCCCCCTGAACAGGAACTAC | |
| | GTGTTCACCGGCTACAGGGTGACCAAGAACAGCAAGGTGCAGATCGGC | |
| | GAGTACACCTTCGAGAAGGGCGACTACGGCGACGCCGTGGTGTACAG | |
| | GGGCACCACCACCTACAAGCTGAACGTGGGCGACTACTTCGTGCTGAC | |
| | CAGCCACACCGTGATGCCCCTGAGCGCCCCCACCCTGGTGCCCCAGG | |
| | AGCACTACGTGAGGATCACCGGCCTGTACCCCACCCTGAACATCAGCG | |
| | ACGAGTTCAGCAGCAACGTGGCCAACTACCAGAAGGTGGGCATGCAGA | |
| | AGTACAGCACCCTGCAGGGCCCCCCCGGCACCGGCAAGAGCCACTTC | |
| | GCCATCGGCCTGGCCCTGTACTACCCCAGCGCCAGGATCGTGTACACC | |
| | GCCTGCAGCCACGCCGCCGTGGACGCCCTGTGCGAGAAGGCCCTGAA | |
| | GTACCTGCCCATCGACAAGTGCAGCAGGATCATCCCCGCCAGGGCCA | |
| | GGGTGGAGTGCTTCGACAAGTTCAAGGTGAACAGCACCCTGGAGCAGT | |
| | ACGTGTTCTGCACCGTGAACGCCCTGCCCGAGACCACCGCCGACATCG | |
| | TGGTGTTCGACGAGATCAGCATGGCCACCAACTACGACCTGAGCGTGG | |
| | TGAACGCCAGGCTGAGGGCCAAGCACTACGTGTACATCGGCGACCCC | |
| | GCCCAGCTGCCCGCCCCCAGGACCCTGCTGACCAAGGGCACCCTGGA | |
| | GCCCGAGTACTTCAACAGCGTGTGCAGGCTGATGAAGACCATCGGCCC | |
| | CGACATGTTCCTGGGCACCTGCAGGAGGTGCCCCGCCGAGATCGTGG | |
| | ACACCGTGAGCGCCCTGGTGTACGACAACAAGCTGAAGGCCCACAAG | |
| | GACAAGAGCGCCCAGTGCTTCAAGATGTTCTACAAGGGCGTGATCACC | |
| | CACGACGTGAGCAGCGCCATCAACAGGCCCCAGATCGGCGTGGTGAG | |
| | GGAGTTCCTGACCAGGAACCCCGCCTGGAGGAAGGCCGTGTTCATCA | |
| | GCCCCTACAACAGCCAGAACGCCGTGGCCAGCAAGATCCTGGGCCTG | |
| | CCCACCCAGACCGTGGACAGCAGCCAGGGCAGCGAGTACGACTACGT | |
| | GATCTTCACCCAGACCACCGAGACCGCCCACAGCTGCAACGTGAACAG | |
| | GTTCAACGTGGCCATCACCAGGGCCAAGGTGGGCATCCTGTGCATCAT | |
| | GAGCGACAGGGACCTGTACGACAAGCTGCAGTTCACCAGCCTGGAGAT | |
| | CCCCAGGAGGAACGTGGCCACCCTGCAGTGATGACTCGAGCTGGTACT | |
| | GCATGCACGCAATGCTAGCTGCCCCTTTCCCGTCCTGGGTACCCCGAG | |
| | TCTCCCCCGACCTCGGGTCCCAGGTATGCTCCCACCTCCACCTGCCCC | |
| | ACTCACCACCTCTGCTAGTTCCAGACACCTCCCAAGCACGCAGCAATG | |
| | CAGCTCAAAACGCTTAGCCTAGCCACACCCCCACGGGAAACAGCAGTG | |
| | ATTAACCTTTAGCAATAAACGAAAGTTTAACTAAGCTATACTAACCCCAG | |
| | GGTTGGTCAATTTCGTGCCAGCCACACCCTGGAGCTAGCAAAAAAAA | |
| 15 | TAGTTATTAATAGTAATCAATTACGGGGTCATTAGTTCATAGCCCATATA | 300 |
| Ad5-Pan-CoV | TGGAGTTCCGCGTTACATAACTTACGGTAAATGGCCCGCCTGGCTGAC | |
| HexaPro- | CGCCCAACGACCCCCGCCCATTGACGTCAATAATGACGTATGTTCCCAT | |
| NSP9-NSP10- | AGTAACGCCAATAGGGACTTTCCATTGACGTCAATGGGTGGAGTATTTA | |
| NSP13 | CGGTAAACTGCCCACTTGGCAGTACATCAAGTGTATCATATGCCAAGTA | |
| | CGCCCCCTATTGACGTCAATGACGGTAAATGGCCCGCCTGGCATTATG | |
| | CCCAGTACATGACCTTATGGGACTTTCCTACTTGGCAGTACATCTACGT | |
| | ATTAGTCATCGCTATTACCATGGTGATGCGGTTTTGGCAGTACATCAAT | |
| | GGGCGTGGATAGCGGTTTGACTCACGGGGATTTCCAAGTCTCCACCCC | |
| | ATTGACGTCAATGGGAGTTTGTTTTGGCACCAAAATCAACGGGACTTTC | |
| | CAAAATGTCGTAACAACTCCGCCCCATTGACGCAAATGGGCGGTAGGC | |
| | GTGTACGGTGGGAGGTCTATATAAGCAGAGCTGGTTTAGTGAACCGTC | |
| | AGATCGAGAATAAACTAGTATTCTTCTGGTCCCCACAGACTCAGAGAGA | |
| | ACCCGCCACCATGTTCGTGTTCCTGGTGCTGCTGCCCCTGGTGAGCAG | |
| | CCAGTGCGTGAACCTGACCACCAGGACCCAGCTGCCCCCCGCCTACA | |
| | CCAACAGCTTCACCAGGGGCGTGTACTACCCCGACAAGGTGTTCAGGA | |
| | GCAGCGTGCTGCACAGCACCCAGGACCTGTTCCTGCCCTTCTTCAGCA | |
| | ACGTGACCTGGTTCCACGCCATCCACGTGAGCGGCACCAACGGCACCA | |
| | AGAGGTTCGACAACCCCGTGCTGCCCTTCAACGACGGCGTGTACTTCG | |
| | CCAGCACCGAGAAGAGCAACATCATCAGGGGCTGGATCTTCGGCACCA | |
| | CCCTGGACAGCAAGACCCAGAGCCTGCTGATCGTGAACAACGCCACCA | |
| | ACGTGGTGATCAAGGTGTGCGAGTTCCAGTTCTGCAACGACCCCTTCC | |
| | TGGGCGTGTACTACCACAAGAACAACAAGAGCTGGATGGAGAGCGAGT | |
| | TCAGGGTGTACAGCAGCGCCAACAACTGCACCTTCGAGTACGTGAGCC | |
| | AGCCCTTCCTGATGGACCTGGAGGGCAAGCAGGGCAACTTCAAGAACC | |
| | TGAGGGAGTTCGTGTTCAAGAACATCGACGGCTACTTCAAGATCTACAG | |
| | CAAGCACACCCCCATCAACCTGGTGAGGGACCTGCCCCAGGGCTTCAG | |
| | CGCCCTGGAGCCCCTGGTGGACCTGCCCATCGGCATCAACATCACCAG | |
| | GTTCCAGACCCTGCTGGCCCTGCACAGGAGCTACCTGACCCCCGGCG | |
| | ACAGCAGCAGCGGCTGGACCGCCGGCGCCGCCGCCTACTACGTGGGC | |
| | TACCTGCAGCCCAGGACCTTCCTGCTGAAGTACAACGAGAACGGCACC | |
| | ATCACCGACGCCGTGGACTGCGCCCTGGACCCCCTGAGCGAGACCAA | |
| | GTGCACCCTGAAGAGCTTCACCGTGGAGAAGGGCATCTACCAGACCAG | |
| | CAACTTCAGGGTGCAGCCCACCGAGAGCATCGTGAGGTTCCCCAACAT | |
| | CACCAACCTGTGCCCCTTCGGCGAGGTGTTCAACGCCACCAGGTTCGC | |
| | CAGCGTGTACGCCTGGAACAGGAAGAGGATCAGCAACTGCGTGGCCG | |
| | ACTACAGCGTGCTGTACAACAGCGCCAGCTTCAGCACCTTCAAGTGCT | |
| | ACGGCGTGAGCCCCACCAAGCTGAACGACCTGTGCTTCACCAACGTGT | |
| | ACGCCGACAGCTTCGTGATCAGGGGCGACGAGGTGAGGCAGATCGCC | |
| | CCCGGCCAGACCGGCAAGATCGCCGACTACAACTACAAGCTGCCCGA | |
| | CGACTTCACCGGCTGCGTGATCGCCTGGAACAGCAACAACCTGGACAG | |
| | CAAGGTGGGCGGCAACTACAACTACCTGTACAGGCTGTTCAGGAAGAG | |
| | CAACCTGAAGCCCTTCGAGAGGGACATCAGCACCGAGATCTACCAGGC | |
| | CGGCAGCACCCCCTGCAACGGCGTGGAGGGCTTCAACTGCTACTTCCC | |
| | CCTGCAGAGCTACGGCTTCCAGCCCACCAACGGCGTGGGCTACCAGC | |
| | CCTACAGGGTGGTGGTGCTGAGCTTCGAGCTGCTGCACGCCCCCGCC | |
| | ACCGTGTGCGGCCCCAAGAAGAGCACCAACCTGGTGAAGAACAAGTGC | |
| | GTGAACTTCAACTTCAACGGCCTGACCGGCACCGGCGTGCTGACCGAG | |
| | AGCAACAAGAAGTTCCTGCCCTTCCAGCAGTTCGGCAGGGACATCGCC | |
| | GACACCACCGACGCCGTGAGGGACCCCCAGACCCTGGAGATCCTGGA | |
| | CATCACCCCCTGCAGCTTCGGCGGCGTGAGCGTGATCACCCCCGGCA | |
| | CCAACACCAGCAACCAGGTGGCCGTGCTGTACCAGGACGTGAACTGCA | |
| | CCGAGGTGCCCGTGGCCATCCACGCCGACCAGCTGACCCCCACCTGG | |
| | AGGGTGTACAGCACCGGCAGCAACGTGTTCCAGACCAGGGCCGGCTG | |
| | CCTGATCGGCGCCGAGCACGTGAACAACAGCTACGAGTGCGACATCCC | |
| | CATCGGCGCCGGCATCTGCGCCAGCTACCAGACCCAGACCAACAGCC | |
| | CCGGCAGCGCCAGCAGCGTGGCCAGCCAGAGCATCATCGCCTACACC | |
| | ATGAGCCTGGGCGCCGAGAACAGCGTGGCCTACAGCAACAACAGCAT | |
| | CGCCATCCCCACCAACTTCACCATCAGCGTGACCACCGAGATCCTGCC | |
| | CGTGAGCATGACCAAGACCAGCGTGGACTGCACCATGTACATCTGCGG | |
| | CGACAGCACCGAGTGCAGCAACCTGCTGCTGCAGTACGGCAGCTTCTG | |
| | CACCCAGCTGAACAGGGCCCTGACCGGCATCGCCGTGGAGCAGGACA | |
| | AGAACACCCAGGAGGTGTTCGCCCAGGTGAAGCAGATCTACAAGACCC | |
| | CCCCCATCAAGGACTTCGGCGGCTTCAACTTCAGCCAGATCCTGCCCG | |
| | ACCCCAGCAAGCCCAGCAAGAGGAGCCCCATCGAGGACCTGCTGTTCA | |
| | ACAAGGTGACCCTGGCCGACGCCGGCTTCATCAAGCAGTACGGCGACT | |
| | GCCTGGGCGACATCGCCGCCAGGGACCTGATCTGCGCCCAGAAGTTC | |
| | AACGGCCTGACCGTGCTGCCCCCCCTGCTGACCGACGAGATGATCGC | |
| | CCAGTACACCAGCGCCCTGCTGGCCGGCACCATCACCAGCGGCTGGA | |
| | CCTTCGGCGCCGGCCCCGCCCTGCAGATCCCCTTCCCCATGCAGATG | |
| | GCCTACAGGTTCAACGGCATCGGCGTGACCCAGAACGTGCTGTACGAG | |
| | AACCAGAAGCTGATCGCCAACCAGTTCAACAGCGCCATCGGCAAGATC | |
| | CAGGACAGCCTGAGCAGCACCCCCAGCGCCCTGGGCAAGCTGCAGGA | |
| | CGTGGTGAACCAGAACGCCCAGGCCCTGAACACCCTGGTGAAGCAGC | |
| | TGAGCAGCAACTTCGGCGCCATCAGCAGCGTGCTGAACGACATCCTGA | |
| | GCAGGCTGGACCCCCCCGAGGCCGAGGTGCAGATCGACAGGCTGATC | |
| | ACCGGCAGGCTGCAGAGCCTGCAGACCTACGTGACCCAGCAGCTGAT | |
| | CAGGGCCGCCGAGATCAGGGCCAGCGCCAACCTGGCCGCCACCAAGA | |
| | TGAGCGAGTGCGTGCTGGGCCAGAGCAAGAGGGTGGACTTCTGCGGC | |
| | AAGGGCTACCACCTGATGAGCTTCCCCCAGAGCGCCCCCCACGGCGT | |
| | GGTGTTCCTGCACGTGACCTACGTGCCCGCCCAGGAGAAGAACTTCAC | |
| | CACCGCCCCCGCCATCTGCCACGACGGCAAGGCCCACTTCCCCAGGG | |
| | AGGGCGTGTTCGTGAGCAACGGCACCCACTGGTTCGTGACCCAGAGG | |
| | AACTTCTACGAGCCCCAGATCATCACCACCGACAACACCTTCGTGAGC | |
| | GGCAACTGCGACGTGGTGATCGGCATCGTGAACAACACCGTGTACGAC | |
| | CCCCTGCAGCCCGAGCTGGACAGCTTCAAGGAGGAGCTGGACAAGTA | |
| | CTTCAAGAACCACACCAGCCCCGACGTGGACCTGGGCGACATCAGCG | |
| | GCATCAACGCCAGCGTGGTGAACATCCAGAAGGAGATCGACAGGCTGA | |
| | ACGAGGTGGCCAAGAACCTGAACGAGAGCCTGATCGACCTGCAGGAG | |
| | CTGGGCAAGTACGAGCAGTACATCAAGTGGCCCTGGTACATCTGGCTG | |
| | GGCTTCATCGCCGGCCTGATCGCCATCGTGATGGTGACCATCATGCTG | |
| | TGCTGCATGACCAGCTGCTGCAGCTGCCTGAAGGGCTGCTGCAGCTGC | |
| | GGCAGCTGCTGCAAGTTCGACGAGGACGACAGCGAGCCCGTGCTGAA | |
| | GGGCGTGAAGCTGCACTACACCGGAAGCGGAGCCACGAACTTCTCTCT | |
| | GTTAAAGCAAGCAGGAGATGTTGAAGAAAACCCCGGGCCTAACAACGA | |
| | GCTGAGCCCCGTGGCCCTGAGGCAGATGAGCTGCGCCGCCGGCACCA | |
| | CCCAGACCGCCTGCACCGACGACAACGCCCTGGCCTACTACAACACCA | |
| | CCAAGGGCGGCAGGTTCGTGCTGGCCCTGCTGAGCGACCTGCAGGAC | |
| | CTGAAGTGGGCCAGGTTCCCCAAGAGCGACGGCACCGGCACCATCTA | |
| | CACCGAGCTGGAGCCCCCCTGCAGGTTCGTGACCGACACCCCCAAGG | |
| | GCCCCAAGGTGAAGTACCTGTACTTCATCAAGGGCCTGAACAACCTGA | |
| | ACAGGGGCATGGTGCTGGGCAGCCTGGCCGCCACCGTGAGGCTGCAG | |
| | GGAAGCGGAGAGGGCAGGGGAAGTCTTCTAACATGCGGGGACGTGGA | |
| | GGAAAATCCCGGCCCCGCCGGCAACGCCACCGAGGTGCCCGCCAACA | |
| | GCACCGTGCTGAGCTTCTGCGCCTTCGCCGTGGACGCCGCCAAGGCC | |
| | TACAAGGACTACCTGGCCAGCGGCGGCCAGCCCATCACCAACTGCGT | |
| | GAAGATGCTGTGCACCCACACCGGCACCGGCCAGGCCATCACCGTGA | |
| | CCCCCGAGGCCAACATGGACCAGGAGAGCTTCGGCGGCGCCAGCTGC | |
| | TGCCTGTACTGCAGGTGCCACATCGACCACCCCAACCCCAAGGGCTTC | |
| | TGCGACCTGAAGGGCAAGTACGTGCAGATCCCCACCACCTGCGCCAAC | |
| | GACCCCGTGGGCTTCACCCTGAAGAACACCGTGTGCACCGTGTGCGG | |
| | CATGTGGAAGGGCTACGGCTGCAGCTGCGACCAGCTGAGGGAGCCCA | |
| | TGCTGCAGGGAAGCGGACAGTGTACTAATTATGCTCTCTTGAAATTGGC | |
| | TGGAGATGTTGAGAGCAACCCAGGTCCCGCCGTGGGCGCCTGCGTGC | |
| | TGTGCAACAGCCAGACCAGCCTGAGGTGCGGCGCCTGCATCAGGAGG | |
| | CCCTTCCTGTGCTGCAAGTGCTGCTACGACCACGTGATCAGCACCAGC | |
| | CACAAGCTGGTGCTGAGCGTGAACCCCTACGTGTGCAACGCCCCCGG | |
| | CTGCGACGTGACCGACGTGACCCAGCTGTACCTGGGCGGCATGAGCT | |
| | ACTACTGCAAGAGCCACAAGCCCCCCATCAGCTTCCCCCTGTGCGCCA | |
| | ACGGCCAGGTGTTCGGCCTGTACAAGAACACCTGCGTGGGCAGCGAC | |
| | AACGTGACCGACTTCAACGCCATCGCCACCTGCGACTGGACCAACGCC | |
| | GGCGACTACATCCTGGCCAACACCTGCACCGAGAGGCTGAAGCTGTTC | |
| | GCCGCCGAGACCCTGAAGGCCACCGAGGAGACCTTCAAGCTGAGCTA | |
| | CGGCATCGCCACCGTGAGGGAGGTGCTGAGCGACAGGGAGCTGCACC | |
| | TGAGCTGGGAGGTGGGCAAGCCCAGGCCCCCCCTGAACAGGAACTAC | |
| | GTGTTCACCGGCTACAGGGTGACCAAGAACAGCAAGGTGCAGATCGGC | |
| | GAGTACACCTTCGAGAAGGGCGACTACGGCGACGCCGTGGTGTACAG | |
| | GGGCACCACCACCTACAAGCTGAACGTGGGCGACTACTTCGTGCTGAC | |
| | CAGCCACACCGTGATGCCCCTGAGCGCCCCCACCCTGGTGCCCCAGG | |
| | AGCACTACGTGAGGATCACCGGCCTGTACCCCACCCTGAACATCAGCG | |
| | ACGAGTTCAGCAGCAACGTGGCCAACTACCAGAAGGTGGGCATGCAGA | |
| | AGTACAGCACCCTGCAGGGCCCCCCCGGCACCGGCAAGAGCCACTTC | |
| | GCCATCGGCCTGGCCCTGTACTACCCCAGCGCCAGGATCGTGTACACC | |
| | GCCTGCAGCCACGCCGCCGTGGACGCCCTGTGCGAGAAGGCCCTGAA | |
| | GTACCTGCCCATCGACAAGTGCAGCAGGATCATCCCCGCCAGGGCCA | |
| | GGGTGGAGTGCTTCGACAAGTTCAAGGTGAACAGCACCCTGGAGCAGT | |
| | ACGTGTTCTGCACCGTGAACGCCCTGCCCGAGACCACCGCCGACATCG | |
| | TGGTGTTCGACGAGATCAGCATGGCCACCAACTACGACCTGAGCGTGG | |
| | TGAACGCCAGGCTGAGGGCCAAGCACTACGTGTACATCGGCGACCCC | |
| | GCCCAGCTGCCCGCCCCCAGGACCCTGCTGACCAAGGGCACCCTGGA | |
| | GCCCGAGTACTTCAACAGCGTGTGCAGGCTGATGAAGACCATCGGCCC | |
| | CGACATGTTCCTGGGCACCTGCAGGAGGTGCCCCGCCGAGATCGTGG | |
| | ACACCGTGAGCGCCCTGGTGTACGACAACAAGCTGAAGGCCCACAAG | |
| | GACAAGAGCGCCCAGTGCTTCAAGATGTTCTACAAGGGCGTGATCACC | |
| | CACGACGTGAGCAGCGCCATCAACAGGCCCCAGATCGGCGTGGTGAG | |
| | GGAGTTCCTGACCAGGAACCCCGCCTGGAGGAAGGCCGTGTTCATCA | |
| | GCCCCTACAACAGCCAGAACGCCGTGGCCAGCAAGATCCTGGGCCTG | |
| | CCCACCCAGACCGTGGACAGCAGCCAGGGCAGCGAGTACGACTACGT | |
| | GATCTTCACCCAGACCACCGAGACCGCCCACAGCTGCAACGTGAACAG | |
| | GTTCAACGTGGCCATCACCAGGGCCAAGGTGGGCATCCTGTGCATCAT | |
| | GAGCGACAGGGACCTGTACGACAAGCTGCAGTTCACCAGCCTGGAGAT | |
| | CCCCAGGAGGAACGTGGCCACCCTGCAGTGATGACTCGAGCTGGTACT | |
| | GCATGCACGCAATGCTAGCTGCCCCTTTCCCGTCCTGGGTACCCCGAG | |
| | TCTCCCCCGACCTCGGGTCCCAGGTATGCTCCCACCTCCACCTGCCCC | |
| | ACTCACCACCTCTGCTAGTTCCAGACACCTCCCAAGCACGCAGCAATG | |
| | CAGCTCAAAACGCTTAGCCTAGCCACACCCCCACGGGAAACAGCAGTG | |
| | ATTAACCTTTAGCAATAAACGAAAGTTTAACTAAGCTATACTAACCCCAG | |
| | GGTTGGTCAATTTCGTGCCAGCCACACCCTGGAGCTAGCAAAAAAAA | |
| 16 | TAGTTATTAATAGTAATCAATTACGGGGTCATTAGTTCATAGCCCATATA | 301 |
| Ad5-Pan-CoV | TGGAGTTCCGCGTTACATAACTTACGGTAAATGGCCCGCCTGGCTGAC | |
| Spike-NSP14- | CGCCCAACGACCCCCGCCCATTGACGTCAATAATGACGTATGTTCCCAT | |
| NSP15 | AGTAACGCCAATAGGGACTTTCCATTGACGTCAATGGGTGGAGTATTTA | |
| | CGGTAAACTGCCCACTTGGCAGTACATCAAGTGTATCATATGCCAAGTA | |
| | CGCCCCCTATTGACGTCAATGACGGTAAATGGCCCGCCTGGCATTATG | |
| | CCCAGTACATGACCTTATGGGACTTTCCTACTTGGCAGTACATCTACGT | |
| | ATTAGTCATCGCTATTACCATGGTGATGCGGTTTTGGCAGTACATCAAT | |
| | GGGCGTGGATAGCGGTTTGACTCACGGGGATTTCCAAGTCTCCACCCC | |
| | ATTGACGTCAATGGGAGTTTGTTTTGGCACCAAAATCAACGGGACTTTC | |
| | CAAAATGTCGTAACAACTCCGCCCCATTGACGCAAATGGGCGGTAGGC | |
| | GTGTACGGTGGGAGGTCTATATAAGCAGAGCTGGTTTAGTGAACCGTC | |
| | AGATCGAGAATAAACTAGTATTCTTCTGGTCCCCACAGACTCAGAGAGA | |
| | ACCCGCCACCATGTTCGTGTTCCTGGTGCTGCTGCCCCTGGTGAGCAG | |
| | CCAGTGCGTGAACCTGACCACCAGGACCCAGCTGCCCCCCGCCTACA | |
| | CCAACAGCTTCACCAGGGGCGTGTACTACCCCGACAAGGTGTTCAGGA | |
| | GCAGCGTGCTGCACAGCACCCAGGACCTGTTCCTGCCCTTCTTCAGCA | |
| | ACGTGACCTGGTTCCACGCCATCCACGTGAGCGGCACCAACGGCACCA | |
| | AGAGGTTCGACAACCCCGTGCTGCCCTTCAACGACGGCGTGTACTTCG | |
| | CCAGCACCGAGAAGAGCAACATCATCAGGGGCTGGATCTTCGGCACCA | |
| | CCCTGGACAGCAAGACCCAGAGCCTGCTGATCGTGAACAACGCCACCA | |
| | ACGTGGTGATCAAGGTGTGCGAGTTCCAGTTCTGCAACGACCCCTTCC | |
| | TGGGCGTGTACTACCACAAGAACAACAAGAGCTGGATGGAGAGCGAGT | |
| | TCAGGGTGTACAGCAGCGCCAACAACTGCACCTTCGAGTACGTGAGCC | |
| | AGCCCTTCCTGATGGACCTGGAGGGCAAGCAGGGCAACTTCAAGAACC | |
| | TGAGGGAGTTCGTGTTCAAGAACATCGACGGCTACTTCAAGATCTACAG | |
| | CAAGCACACCCCCATCAACCTGGTGAGGGACCTGCCCCAGGGCTTCAG | |
| | CGCCCTGGAGCCCCTGGTGGACCTGCCCATCGGCATCAACATCACCAG | |
| | GTTCCAGACCCTGCTGGCCCTGCACAGGAGCTACCTGACCCCCGGCG | |
| | ACAGCAGCAGCGGCTGGACCGCCGGCGCCGCCGCCTACTACGTGGGC | |
| | TACCTGCAGCCCAGGACCTTCCTGCTGAAGTACAACGAGAACGGCACC | |
| | ATCACCGACGCCGTGGACTGCGCCCTGGACCCCCTGAGCGAGACCAA | |
| | GTGCACCCTGAAGAGCTTCACCGTGGAGAAGGGCATCTACCAGACCAG | |
| | CAACTTCAGGGTGCAGCCCACCGAGAGCATCGTGAGGTTCCCCAACAT | |
| | CACCAACCTGTGCCCCTTCGGCGAGGTGTTCAACGCCACCAGGTTCGC | |
| | CAGCGTGTACGCCTGGAACAGGAAGAGGATCAGCAACTGCGTGGCCG | |
| | ACTACAGCGTGCTGTACAACAGCGCCAGCTTCAGCACCTTCAAGTGCT | |
| | ACGGCGTGAGCCCCACCAAGCTGAACGACCTGTGCTTCACCAACGTGT | |
| | ACGCCGACAGCTTCGTGATCAGGGGCGACGAGGTGAGGCAGATCGCC | |
| | CCCGGCCAGACCGGCAAGATCGCCGACTACAACTACAAGCTGCCCGA | |
| | CGACTTCACCGGCTGCGTGATCGCCTGGAACAGCAACAACCTGGACAG | |
| | CAAGGTGGGCGGCAACTACAACTACCTGTACAGGCTGTTCAGGAAGAG | |
| | CAACCTGAAGCCCTTCGAGAGGGACATCAGCACCGAGATCTACCAGGC | |
| | CGGCAGCACCCCCTGCAACGGCGTGGAGGGCTTCAACTGCTACTTCCC | |
| | CCTGCAGAGCTACGGCTTCCAGCCCACCAACGGCGTGGGCTACCAGC | |
| | CCTACAGGGTGGTGGTGCTGAGCTTCGAGCTGCTGCACGCCCCCGCC | |
| | ACCGTGTGCGGCCCCAAGAAGAGCACCAACCTGGTGAAGAACAAGTGC | |
| | GTGAACTTCAACTTCAACGGCCTGACCGGCACCGGCGTGCTGACCGAG | |
| | AGCAACAAGAAGTTCCTGCCCTTCCAGCAGTTCGGCAGGGACATCGCC | |
| | GACACCACCGACGCCGTGAGGGACCCCCAGACCCTGGAGATCCTGGA | |
| | CATCACCCCCTGCAGCTTCGGCGGCGTGAGCGTGATCACCCCCGGCA | |
| | CCAACACCAGCAACCAGGTGGCCGTGCTGTACCAGGACGTGAACTGCA | |
| | CCGAGGTGCCCGTGGCCATCCACGCCGACCAGCTGACCCCCACCTGG | |
| | AGGGTGTACAGCACCGGCAGCAACGTGTTCCAGACCAGGGCCGGCTG | |
| | CCTGATCGGCGCCGAGCACGTGAACAACAGCTACGAGTGCGACATCCC | |
| | CATCGGCGCCGGCATCTGCGCCAGCTACCAGACCCAGACCAACAGCC | |
| | CCAGGAGGGCCAGGAGCGTGGCCAGCCAGAGCATCATCGCCTACACC | |
| | ATGAGCCTGGGCGCCGAGAACAGCGTGGCCTACAGCAACAACAGCAT | |
| | CGCCATCCCCACCAACTTCACCATCAGCGTGACCACCGAGATCCTGCC | |
| | CGTGAGCATGACCAAGACCAGCGTGGACTGCACCATGTACATCTGCGG | |
| | CGACAGCACCGAGTGCAGCAACCTGCTGCTGCAGTACGGCAGCTTCTG | |
| | CACCCAGCTGAACAGGGCCCTGACCGGCATCGCCGTGGAGCAGGACA | |
| | AGAACACCCAGGAGGTGTTCGCCCAGGTGAAGCAGATCTACAAGACCC | |
| | CCCCCATCAAGGACTTCGGCGGCTTCAACTTCAGCCAGATCCTGCCCG | |
| | ACCCCAGCAAGCCCAGCAAGAGGAGCTTCATCGAGGACCTGCTGTTCA | |
| | ACAAGGTGACCCTGGCCGACGCCGGCTTCATCAAGCAGTACGGCGACT | |
| | GCCTGGGCGACATCGCCGCCAGGGACCTGATCTGCGCCCAGAAGTTC | |
| | AACGGCCTGACCGTGCTGCCCCCCCTGCTGACCGACGAGATGATCGC | |
| | CCAGTACACCAGCGCCCTGCTGGCCGGCACCATCACCAGCGGCTGGA | |
| | CCTTCGGCGCCGGCGCCGCCCTGCAGATCCCCTTCGCCATGCAGATG | |
| | GCCTACAGGTTCAACGGCATCGGCGTGACCCAGAACGTGCTGTACGAG | |
| | AACCAGAAGCTGATCGCCAACCAGTTCAACAGCGCCATCGGCAAGATC | |
| | CAGGACAGCCTGAGCAGCACCGCCAGCGCCCTGGGCAAGCTGCAGGA | |
| | CGTGGTGAACCAGAACGCCCAGGCCCTGAACACCCTGGTGAAGCAGC | |
| | TGAGCAGCAACTTCGGCGCCATCAGCAGCGTGCTGAACGACATCCTGA | |
| | GCAGGCTGGACCCCCCCGAGGCCGAGGTGCAGATCGACAGGCTGATC | |
| | ACCGGCAGGCTGCAGAGCCTGCAGACCTACGTGACCCAGCAGCTGAT | |
| | CAGGGCCGCCGAGATCAGGGCCAGCGCCAACCTGGCCGCCACCAAGA | |
| | TGAGCGAGTGCGTGCTGGGCCAGAGCAAGAGGGTGGACTTCTGCGGC | |
| | AAGGGCTACCACCTGATGAGCTTCCCCCAGAGCGCCCCCCACGGCGT | |
| | GGTGTTCCTGCACGTGACCTACGTGCCCGCCCAGGAGAAGAACTTCAC | |
| | CACCGCCCCCGCCATCTGCCACGACGGCAAGGCCCACTTCCCCAGGG | |
| | AGGGCGTGTTCGTGAGCAACGGCACCCACTGGTTCGTGACCCAGAGG | |
| | AACTTCTACGAGCCCCAGATCATCACCACCGACAACACCTTCGTGAGC | |
| | GGCAACTGCGACGTGGTGATCGGCATCGTGAACAACACCGTGTACGAC | |
| | CCCCTGCAGCCCGAGCTGGACAGCTTCAAGGAGGAGCTGGACAAGTA | |
| | CTTCAAGAACCACACCAGCCCCGACGTGGACCTGGGCGACATCAGCG | |
| | GCATCAACGCCAGCGTGGTGAACATCCAGAAGGAGATCGACAGGCTGA | |
| | ACGAGGTGGCCAAGAACCTGAACGAGAGCCTGATCGACCTGCAGGAG | |
| | CTGGGCAAGTACGAGCAGTACATCAAGTGGCCCTGGTACATCTGGCTG | |
| | GGCTTCATCGCCGGCCTGATCGCCATCGTGATGGTGACCATCATGCTG | |
| | TGCTGCATGACCAGCTGCTGCAGCTGCCTGAAGGGCTGCTGCAGCTGC | |
| | GGCAGCTGCTGCAAGTTCGACGAGGACGACAGCGAGCCCGTGCTGAA | |
| | GGGCGTGAAGCTGCACTACACCGGAAGCGGAGCCACGAACTTCTCTCT | |
| | GTTAAAGCAAGCAGGAGATGTTGAAGAAAACCCCGGGCCTGCCGAGAA | |
| | CGTGACCGGCCTGTTCAAGGACTGCAGCAAGGTGATCACCGGCCTGCA | |
| | CCCCACCCAGGCCCCCACCCACCTGAGCGTGGACACCAAGTTCAAGAC | |
| | CGAGGGCCTGTGCGTGGACATCCCCGGCATCCCCAAGGACATGACCT | |
| | ACAGGAGGCTGATCAGCATGATGGGCTTCAAGATGAACTACCAGGTGA | |
| | ACGGCTACCCCAACATGTTCATCACCAGGGAGGAGGCCATCAGGCACG | |
| | TGAGGGCCTGGATCGGCTTCGACGTGGAGGGCTGCCACGCCACCAGG | |
| | GAGGCCGTGGGCACCAACCTGCCCCTGCAGCTGGGCTTCAGCACCGG | |
| | CGTGAACCTGGTGGCCGTGCCCACCGGCTACGTGGACACCCCCAACA | |
| | ACACCGACTTCAGCAGGGTGAGCGCCAAGCCCCCCCCCGGCGACCAG | |
| | TTCAAGCACCTGATCCCCCTGATGTACAAGGGCCTGCCCTGGAACGTG | |
| | GTGAGGATCAAGATCGTGCAGATGCTGAGCGACACCCTGAAGAACCTG | |
| | AGCGACAGGGTGGTGTTCGTGCTGTGGGCCCACGGCTTCGAGCTGAC | |
| | CAGCATGAAGTACTTCGTGAAGATCGGCCCCGAGAGGACCTGCTGCCT | |
| | GTGCGACAGGAGGGCCACCTGCTTCAGCACCGCCAGCGACACCTACG | |
| | CCTGCTGGCACCACAGCATCGGCTTCGACTACGTGTACAACCCCTTCA | |
| | TGATCGACGTGCAGCAGTGGGGCTTCACCGGCAACCTGCAGAGCAAC | |
| | CACGACCTGTACTGCCAGGTGCACGGCAACGCCCACGTGGCCAGCTG | |
| | CGACGCCATCATGACCAGGTGCCTGGCCGTGCACGAGTGCTTCGTGAA | |
| | GAGGGTGGACTGGACCATCGAGTACCCCATCATCGGCGACGAGCTGA | |
| | AGATCAACGCCGCCTGCAGGAAGGTGCAGCACATGGTGGTGAAGGCC | |
| | GCCCTGCTGGCCGACAAGTTCCCCGTGCTGCACGACATCGGCAACCC | |
| | CAAGGCCATCAAGTGCGTGCCCCAGGCCGACGTGGAGTGGAAGTTCTA | |
| | CGACGCCCAGCCCTGCAGCGACAAGGCCTACAAGATCGAGGAGCTGT | |
| | TCTACAGCTACGCCACCCACAGCGACAAGTTCACCGACGGCGTGTGCC | |
| | TGTTCTGGAACTGCAACGTGGACAGGTACCCCGCCAACAGCATCGTGT | |
| | GCAGGTTCGACACCAGGGTGCTGAGCAACCTGAACCTGCCCGGCTGC | |
| | GACGGCGGCAGCCTGTACGTGAACAAGCACGCCTTCCACACCCCCGC | |
| | CTTCGACAAGAGCGCCTTCGTGAACCTGAAGCAGCTGCCCTTCTTCTAC | |
| | TACAGCGACAGCCCCTGCGAGAGCCACGGCAAGCAGGTGGTGAGCGA | |
| | CATCGACTACGTGCCCCTGAAGAGCGCCACCTGCATCACCAGGTGCAA | |
| | CCTGGGCGGCGCCGTGTGCAGGCACCACGCCAACGAGTACAGGCTGT | |
| | ACCTGGACGCCTACAACATGATGATCAGCGCCGGCTTCAGCCTGTGGG | |
| | TGTACAAGCAGTTCGACACCTACAACCTGTGGAACACCTTCACCAGGCT | |
| | GCAGGGAAGCGGAGAGGGCAGGGGAAGTCTTCTAACATGCGGGGACG | |
| | TGGAGGAAAATCCCGGCCCCAGCCTGGAGAACGTGGCCTTCAACGTG | |
| | GTGAACAAGGGCCACTTCGACGGCCAGCAGGGCGAGGTGCCCGTGAG | |
| | CATCATCAACAACACCGTGTACACCAAGGTGGACGGCGTGGACGTGGA | |
| | GCTGTTCGAGAACAAGACCACCCTGCCCGTGAACGTGGCCTTCGAGCT | |
| | GTGGGCCAAGAGGAACATCAAGCCCGTGCCCGAGGTGAAGATCCTGA | |
| | ACAACCTGGGCGTGGACATCGCCGCCAACACCGTGATCTGGGACTACA | |
| | AGAGGGACGCCCCCGCCCACATCAGCACCATCGGCGTGTGCAGCATG | |
| | ACCGACATCGCCAAGAAGCCCACCGAGACCATCTGCGCCCCCCTGACC | |
| | GTGTTCTTCGACGGCAGGGTGGACGGCCAGGTGGACCTGTTCAGGAA | |
| | CGCCAGGAACGGCGTGCTGATCACCGAGGGCAGCGTGAAGGGCCTGC | |
| | AGCCCAGCGTGGGCCCCAAGCAGGCCAGCCTGAACGGCGTGACCCTG | |
| | ATCGGCGAGGCCGTGAAGACCCAGTTCAACTACTACAAGAAGGTGGAC | |
| | GGCGTGGTGCAGCAGCTGCCCGAGACCTACTTCACCCAGAGCAGGAA | |
| | CCTGCAGGAGTTCAAGCCCAGGAGCCAGATGGAGATCGACTTCCTGGA | |
| | GCTGGCCATGGACGAGTTCATCGAGAGGTACAAGCTGGAGGGCTACG | |
| | CCTTCGAGCACATCGTGTACGGCGACTTCAGCCACAGCCAGCTGGGCG | |
| | GCCTGCACCTGCTGATCGGCCTGGCCAAGAGGTTCAAGGAGAGCCCC | |
| | TTCGAGCTGGAGGACTTCATCCCCATGGACAGCACCGTGAAGAACTAC | |
| | TTCATCACCGACGCCCAGACCGGCAGCAGCAAGTGCGTGTGCAGCGT | |
| | GATCGACCTGCTGCTGGACGACTTCGTGGAGATCATCAAGAGCCAGGA | |
| | CCTGAGCGTGGTGAGCAAGGTGGTGAAGGTGACCATCGACTACACCGA | |
| | GATCAGCTTCATGCTGTGGTGCAAGGACGGCCACGTGGAGACCTTCTA | |
| | CCCCAAGCTGCAGTGATGACTCGAGCTGGTACTGCATGCACGCAATGC | |
| | TAGCTGCCCCTTTCCCGTCCTGGGTACCCCGAGTCTCCCCCGACCTCG | |
| | GGTCCCAGGTATGCTCCCACCTCCACCTGCCCCACTCACCACCTCTGC | |
| | TAGTTCCAGACACCTCCCAAGCACGCAGCAATGCAGCTCAAAACGCTTA | |
| | GCCTAGCCACACCCCCACGGGAAACAGCAGTGATTAACCTTTAGCAAT | |
| | AAACGAAAGTTTAACTAAGCTATACTAACCCCAGGGTTGGTCAATTTCG | |
| | TGCCAGCCACACCCTGGAGCTAGCAAAAAAAA | |
| 17 | TAGTTATTAATAGTAATCAATTACGGGGTCATTAGTTCATAGCCCATATA | 302 |
| Ad5-Pan-CoV | TGGAGTTCCGCGTTACATAACTTACGGTAAATGGCCCGCCTGGCTGAC | |
| HexaPro- | CGCCCAACGACCCCCGCCCATTGACGTCAATAATGACGTATGTTCCCAT | |
| NSP14- | AGTAACGCCAATAGGGACTTTCCATTGACGTCAATGGGTGGAGTATTTA | |
| NSP15 | CGGTAAACTGCCCACTTGGCAGTACATCAAGTGTATCATATGCCAAGTA | |
| | CGCCCCCTATTGACGTCAATGACGGTAAATGGCCCGCCTGGCATTATG | |
| | CCCAGTACATGACCTTATGGGACTTTCCTACTTGGCAGTACATCTACGT | |
| | ATTAGTCATCGCTATTACCATGGTGATGCGGTTTTGGCAGTACATCAAT | |
| | GGGCGTGGATAGCGGTTTGACTCACGGGGATTTCCAAGTCTCCACCCC | |
| | ATTGACGTCAATGGGAGTTTGTTTTGGCACCAAAATCAACGGGACTTTC | |
| | CAAAATGTCGTAACAACTCCGCCCCATTGACGCAAATGGGCGGTAGGC | |
| | GTGTACGGTGGGAGGTCTATATAAGCAGAGCTGGTTTAGTGAACCGTC | |
| | AGATCGAGAATAAACTAGTATTCTTCTGGTCCCCACAGACTCAGAGAGA | |
| | ACCCGCCACCATGTTCGTGTTCCTGGTGCTGCTGCCCCTGGTGAGCAG | |
| | CCAGTGCGTGAACCTGACCACCAGGACCCAGCTGCCCCCCGCCTACA | |
| | CCAACAGCTTCACCAGGGGCGTGTACTACCCCGACAAGGTGTTCAGGA | |
| | GCAGCGTGCTGCACAGCACCCAGGACCTGTTCCTGCCCTTCTTCAGCA | |
| | ACGTGACCTGGTTCCACGCCATCCACGTGAGCGGCACCAACGGCACCA | |
| | AGAGGTTCGACAACCCCGTGCTGCCCTTCAACGACGGCGTGTACTTCG | |
| | CCAGCACCGAGAAGAGCAACATCATCAGGGGCTGGATCTTCGGCACCA | |
| | CCCTGGACAGCAAGACCCAGAGCCTGCTGATCGTGAACAACGCCACCA | |
| | ACGTGGTGATCAAGGTGTGCGAGTTCCAGTTCTGCAACGACCCCTTCC | |
| | TGGGCGTGTACTACCACAAGAACAACAAGAGCTGGATGGAGAGCGAGT | |
| | TCAGGGTGTACAGCAGCGCCAACAACTGCACCTTCGAGTACGTGAGCC | |
| | AGCCCTTCCTGATGGACCTGGAGGGCAAGCAGGGCAACTTCAAGAACC | |
| | TGAGGGAGTTCGTGTTCAAGAACATCGACGGCTACTTCAAGATCTACAG | |
| | CAAGCACACCCCCATCAACCTGGTGAGGGACCTGCCCCAGGGCTTCAG | |
| | CGCCCTGGAGCCCCTGGTGGACCTGCCCATCGGCATCAACATCACCAG | |
| | GTTCCAGACCCTGCTGGCCCTGCACAGGAGCTACCTGACCCCCGGCG | |
| | ACAGCAGCAGCGGCTGGACCGCCGGCGCCGCCGCCTACTACGTGGGC | |
| | TACCTGCAGCCCAGGACCTTCCTGCTGAAGTACAACGAGAACGGCACC | |
| | ATCACCGACGCCGTGGACTGCGCCCTGGACCCCCTGAGCGAGACCAA | |
| | GTGCACCCTGAAGAGCTTCACCGTGGAGAAGGGCATCTACCAGACCAG | |
| | CAACTTCAGGGTGCAGCCCACCGAGAGCATCGTGAGGTTCCCCAACAT | |
| | CACCAACCTGTGCCCCTTCGGCGAGGTGTTCAACGCCACCAGGTTCGC | |
| | CAGCGTGTACGCCTGGAACAGGAAGAGGATCAGCAACTGCGTGGCCG | |
| | ACTACAGCGTGCTGTACAACAGCGCCAGCTTCAGCACCTTCAAGTGCT | |
| | ACGGCGTGAGCCCCACCAAGCTGAACGACCTGTGCTTCACCAACGTGT | |
| | ACGCCGACAGCTTCGTGATCAGGGGCGACGAGGTGAGGCAGATCGCC | |
| | CCCGGCCAGACCGGCAAGATCGCCGACTACAACTACAAGCTGCCCGA | |
| | CGACTTCACCGGCTGCGTGATCGCCTGGAACAGCAACAACCTGGACAG | |
| | CAAGGTGGGCGGCAACTACAACTACCTGTACAGGCTGTTCAGGAAGAG | |
| | CAACCTGAAGCCCTTCGAGAGGGACATCAGCACCGAGATCTACCAGGC | |
| | CGGCAGCACCCCCTGCAACGGCGTGGAGGGCTTCAACTGCTACTTCCC | |
| | CCTGCAGAGCTACGGCTTCCAGCCCACCAACGGCGTGGGCTACCAGC | |
| | CCTACAGGGTGGTGGTGCTGAGCTTCGAGCTGCTGCACGCCCCCGCC | |
| | ACCGTGTGCGGCCCCAAGAAGAGCACCAACCTGGTGAAGAACAAGTGC | |
| | GTGAACTTCAACTTCAACGGCCTGACCGGCACCGGCGTGCTGACCGAG | |
| | AGCAACAAGAAGTTCCTGCCCTTCCAGCAGTTCGGCAGGGACATCGCC | |
| | GACACCACCGACGCCGTGAGGGACCCCCAGACCCTGGAGATCCTGGA | |
| | CATCACCCCCTGCAGCTTCGGCGGCGTGAGCGTGATCACCCCCGGCA | |
| | CCAACACCAGCAACCAGGTGGCCGTGCTGTACCAGGACGTGAACTGCA | |
| | CCGAGGTGCCCGTGGCCATCCACGCCGACCAGCTGACCCCCACCTGG | |
| | AGGGTGTACAGCACCGGCAGCAACGTGTTCCAGACCAGGGCCGGCTG | |
| | CCTGATCGGCGCCGAGCACGTGAACAACAGCTACGAGTGCGACATCCC | |
| | CATCGGCGCCGGCATCTGCGCCAGCTACCAGACCCAGACCAACAGCC | |
| | CCGGCAGCGCCAGCAGCGTGGCCAGCCAGAGCATCATCGCCTACACC | |
| | ATGAGCCTGGGCGCCGAGAACAGCGTGGCCTACAGCAACAACAGCAT | |
| | CGCCATCCCCACCAACTTCACCATCAGCGTGACCACCGAGATCCTGCC | |
| | CGTGAGCATGACCAAGACCAGCGTGGACTGCACCATGTACATCTGCGG | |
| | CGACAGCACCGAGTGCAGCAACCTGCTGCTGCAGTACGGCAGCTTCTG | |
| | CACCCAGCTGAACAGGGCCCTGACCGGCATCGCCGTGGAGCAGGACA | |
| | AGAACACCCAGGAGGTGTTCGCCCAGGTGAAGCAGATCTACAAGACCC | |
| | CCCCCATCAAGGACTTCGGCGGCTTCAACTTCAGCCAGATCCTGCCCG | |
| | ACCCCAGCAAGCCCAGCAAGAGGAGCCCCATCGAGGACCTGCTGTTCA | |
| | ACAAGGTGACCCTGGCCGACGCCGGCTTCATCAAGCAGTACGGCGACT | |
| | GCCTGGGCGACATCGCCGCCAGGGACCTGATCTGCGCCCAGAAGTTC | |
| | AACGGCCTGACCGTGCTGCCCCCCCTGCTGACCGACGAGATGATCGC | |
| | CCAGTACACCAGCGCCCTGCTGGCCGGCACCATCACCAGCGGCTGGA | |
| | CCTTCGGCGCCGGCCCCGCCCTGCAGATCCCCTTCCCCATGCAGATG | |
| | GCCTACAGGTTCAACGGCATCGGCGTGACCCAGAACGTGCTGTACGAG | |
| | AACCAGAAGCTGATCGCCAACCAGTTCAACAGCGCCATCGGCAAGATC | |
| | CAGGACAGCCTGAGCAGCACCCCCAGCGCCCTGGGCAAGCTGCAGGA | |
| | CGTGGTGAACCAGAACGCCCAGGCCCTGAACACCCTGGTGAAGCAGC | |
| | TGAGCAGCAACTTCGGCGCCATCAGCAGCGTGCTGAACGACATCCTGA | |
| | GCAGGCTGGACCCCCCCGAGGCCGAGGTGCAGATCGACAGGCTGATC | |
| | ACCGGCAGGCTGCAGAGCCTGCAGACCTACGTGACCCAGCAGCTGAT | |
| | CAGGGCCGCCGAGATCAGGGCCAGCGCCAACCTGGCCGCCACCAAGA | |
| | TGAGCGAGTGCGTGCTGGGCCAGAGCAAGAGGGTGGACTTCTGCGGC | |
| | AAGGGCTACCACCTGATGAGCTTCCCCCAGAGCGCCCCCCACGGCGT | |
| | GGTGTTCCTGCACGTGACCTACGTGCCCGCCCAGGAGAAGAACTTCAC | |
| | CACCGCCCCCGCCATCTGCCACGACGGCAAGGCCCACTTCCCCAGGG | |
| | AGGGCGTGTTCGTGAGCAACGGCACCCACTGGTTCGTGACCCAGAGG | |
| | AACTTCTACGAGCCCCAGATCATCACCACCGACAACACCTTCGTGAGC | |
| | GGCAACTGCGACGTGGTGATCGGCATCGTGAACAACACCGTGTACGAC | |
| | CCCCTGCAGCCCGAGCTGGACAGCTTCAAGGAGGAGCTGGACAAGTA | |
| | CTTCAAGAACCACACCAGCCCCGACGTGGACCTGGGCGACATCAGCG | |
| | GCATCAACGCCAGCGTGGTGAACATCCAGAAGGAGATCGACAGGCTGA | |
| | ACGAGGTGGCCAAGAACCTGAACGAGAGCCTGATCGACCTGCAGGAG | |
| | CTGGGCAAGTACGAGCAGTACATCAAGTGGCCCTGGTACATCTGGCTG | |
| | GGCTTCATCGCCGGCCTGATCGCCATCGTGATGGTGACCATCATGCTG | |
| | TGCTGCATGACCAGCTGCTGCAGCTGCCTGAAGGGCTGCTGCAGCTGC | |
| | GGCAGCTGCTGCAAGTTCGACGAGGACGACAGCGAGCCCGTGCTGAA | |
| | GGGCGTGAAGCTGCACTACACCGGAAGCGGAGCCACGAACTTCTCTCT | |
| | GTTAAAGCAAGCAGGAGATGTTGAAGAAAACCCCGGGCCTGCCGAGAA | |
| | CGTGACCGGCCTGTTCAAGGACTGCAGCAAGGTGATCACCGGCCTGCA | |
| | CCCCACCCAGGCCCCCACCCACCTGAGCGTGGACACCAAGTTCAAGAC | |
| | CGAGGGCCTGTGCGTGGACATCCCCGGCATCCCCAAGGACATGACCT | |
| | ACAGGAGGCTGATCAGCATGATGGGCTTCAAGATGAACTACCAGGTGA | |
| | ACGGCTACCCCAACATGTTCATCACCAGGGAGGAGGCCATCAGGCACG | |
| | TGAGGGCCTGGATCGGCTTCGACGTGGAGGGCTGCCACGCCACCAGG | |
| | GAGGCCGTGGGCACCAACCTGCCCCTGCAGCTGGGCTTCAGCACCGG | |
| | CGTGAACCTGGTGGCCGTGCCCACCGGCTACGTGGACACCCCCAACA | |
| | ACACCGACTTCAGCAGGGTGAGCGCCAAGCCCCCCCCCGGCGACCAG | |
| | TTCAAGCACCTGATCCCCCTGATGTACAAGGGCCTGCCCTGGAACGTG | |
| | GTGAGGATCAAGATCGTGCAGATGCTGAGCGACACCCTGAAGAACCTG | |
| | AGCGACAGGGTGGTGTTCGTGCTGTGGGCCCACGGCTTCGAGCTGAC | |
| | CAGCATGAAGTACTTCGTGAAGATCGGCCCCGAGAGGACCTGCTGCCT | |
| | GTGCGACAGGAGGGCCACCTGCTTCAGCACCGCCAGCGACACCTACG | |
| | CCTGCTGGCACCACAGCATCGGCTTCGACTACGTGTACAACCCCTTCA | |
| | TGATCGACGTGCAGCAGTGGGGCTTCACCGGCAACCTGCAGAGCAAC | |
| | CACGACCTGTACTGCCAGGTGCACGGCAACGCCCACGTGGCCAGCTG | |
| | CGACGCCATCATGACCAGGTGCCTGGCCGTGCACGAGTGCTTCGTGAA | |
| | GAGGGTGGACTGGACCATCGAGTACCCCATCATCGGCGACGAGCTGA | |
| | AGATCAACGCCGCCTGCAGGAAGGTGCAGCACATGGTGGTGAAGGCC | |
| | GCCCTGCTGGCCGACAAGTTCCCCGTGCTGCACGACATCGGCAACCC | |
| | CAAGGCCATCAAGTGCGTGCCCCAGGCCGACGTGGAGTGGAAGTTCTA | |
| | CGACGCCCAGCCCTGCAGCGACAAGGCCTACAAGATCGAGGAGCTGT | |
| | TCTACAGCTACGCCACCCACAGCGACAAGTTCACCGACGGCGTGTGCC | |
| | TGTTCTGGAACTGCAACGTGGACAGGTACCCCGCCAACAGCATCGTGT | |
| | GCAGGTTCGACACCAGGGTGCTGAGCAACCTGAACCTGCCCGGCTGC | |
| | GACGGCGGCAGCCTGTACGTGAACAAGCACGCCTTCCACACCCCCGC | |
| | CTTCGACAAGAGCGCCTTCGTGAACCTGAAGCAGCTGCCCTTCTTCTAC | |
| | TACAGCGACAGCCCCTGCGAGAGCCACGGCAAGCAGGTGGTGAGCGA | |
| | CATCGACTACGTGCCCCTGAAGAGCGCCACCTGCATCACCAGGTGCAA | |
| | CCTGGGCGGCGCCGTGTGCAGGCACCACGCCAACGAGTACAGGCTGT | |
| | ACCTGGACGCCTACAACATGATGATCAGCGCCGGCTTCAGCCTGTGGG | |
| | TGTACAAGCAGTTCGACACCTACAACCTGTGGAACACCTTCACCAGGCT | |
| | GCAGGGAAGCGGAGAGGGCAGGGGAAGTCTTCTAACATGCGGGGACG | |
| | TGGAGGAAAATCCCGGCCCCAGCCTGGAGAACGTGGCCTTCAACGTG | |
| | GTGAACAAGGGCCACTTCGACGGCCAGCAGGGCGAGGTGCCCGTGAG | |
| | CATCATCAACAACACCGTGTACACCAAGGTGGACGGCGTGGACGTGGA | |
| | GCTGTTCGAGAACAAGACCACCCTGCCCGTGAACGTGGCCTTCGAGCT | |
| | GTGGGCCAAGAGGAACATCAAGCCCGTGCCCGAGGTGAAGATCCTGA | |
| | ACAACCTGGGCGTGGACATCGCCGCCAACACCGTGATCTGGGACTACA | |
| | AGAGGGACGCCCCCGCCCACATCAGCACCATCGGCGTGTGCAGCATG | |
| | ACCGACATCGCCAAGAAGCCCACCGAGACCATCTGCGCCCCCCTGACC | |
| | GTGTTCTTCGACGGCAGGGTGGACGGCCAGGTGGACCTGTTCAGGAA | |
| | CGCCAGGAACGGCGTGCTGATCACCGAGGGCAGCGTGAAGGGCCTGC | |
| | AGCCCAGCGTGGGCCCCAAGCAGGCCAGCCTGAACGGCGTGACCCTG | |
| | ATCGGCGAGGCCGTGAAGACCCAGTTCAACTACTACAAGAAGGTGGAC | |
| | GGCGTGGTGCAGCAGCTGCCCGAGACCTACTTCACCCAGAGCAGGAA | |
| | CCTGCAGGAGTTCAAGCCCAGGAGCCAGATGGAGATCGACTTCCTGGA | |
| | GCTGGCCATGGACGAGTTCATCGAGAGGTACAAGCTGGAGGGCTACG | |
| | CCTTCGAGCACATCGTGTACGGCGACTTCAGCCACAGCCAGCTGGGCG | |
| | GCCTGCACCTGCTGATCGGCCTGGCCAAGAGGTTCAAGGAGAGCCCC | |
| | TTCGAGCTGGAGGACTTCATCCCCATGGACAGCACCGTGAAGAACTAC | |
| | TTCATCACCGACGCCCAGACCGGCAGCAGCAAGTGCGTGTGCAGCGT | |
| | GATCGACCTGCTGCTGGACGACTTCGTGGAGATCATCAAGAGCCAGGA | |
| | CCTGAGCGTGGTGAGCAAGGTGGTGAAGGTGACCATCGACTACACCGA | |
| | GATCAGCTTCATGCTGTGGTGCAAGGACGGCCACGTGGAGACCTTCTA | |
| | CCCCAAGCTGCAGTGATGACTCGAGCTGGTACTGCATGCACGCAATGC | |
| | TAGCTGCCCCTTTCCCGTCCTGGGTACCCCGAGTCTCCCCCGACCTCG | |
| | GGTCCCAGGTATGCTCCCACCTCCACCTGCCCCACTCACCACCTCTGC | |
| | TAGTTCCAGACACCTCCCAAGCACGCAGCAATGCAGCTCAAAACGCTTA | |
| | GCCTAGCCACACCCCCACGGGAAACAGCAGTGATTAACCTTTAGCAAT | |
| | AAACGAAAGTTTAACTAAGCTATACTAACCCCAGGGTTGGTCAATTTCG | |
| | TGCCAGCCACACCCTGGAGCTAGCAAAAAAAA | |
| 18 | TAGTTATTAATAGTAATCAATTACGGGGTCATTAGTTCATAGCCCATATA | 303 |
| Ad5-Pan-CoV | TGGAGTTCCGCGTTACATAACTTACGGTAAATGGCCCGCCTGGCTGAC | |
| Spike-NSP16 | CGCCCAACGACCCCCGCCCATTGACGTCAATAATGACGTATGTTCCCAT | |
| | AGTAACGCCAATAGGGACTTTCCATTGACGTCAATGGGTGGAGTATTTA | |
| | CGGTAAACTGCCCACTTGGCAGTACATCAAGTGTATCATATGCCAAGTA | |
| | CGCCCCCTATTGACGTCAATGACGGTAAATGGCCCGCCTGGCATTATG | |
| | CCCAGTACATGACCTTATGGGACTTTCCTACTTGGCAGTACATCTACGT | |
| | ATTAGTCATCGCTATTACCATGGTGATGCGGTTTTGGCAGTACATCAAT | |
| | GGGCGTGGATAGCGGTTTGACTCACGGGGATTTCCAAGTCTCCACCCC | |
| | ATTGACGTCAATGGGAGTTTGTTTTGGCACCAAAATCAACGGGACTTTC | |
| | CAAAATGTCGTAACAACTCCGCCCCATTGACGCAAATGGGCGGTAGGC | |
| | GTGTACGGTGGGAGGTCTATATAAGCAGAGCTGGTTTAGTGAACCGTC | |
| | AGATCGAGAATAAACTAGTATTCTTCTGGTCCCCACAGACTCAGAGAGA | |
| | ACCCGCCACCATGTTCGTGTTCCTGGTGCTGCTGCCCCTGGTGAGCAG | |
| | CCAGTGCGTGAACCTGACCACCAGGACCCAGCTGCCCCCCGCCTACA | |
| | CCAACAGCTTCACCAGGGGCGTGTACTACCCCGACAAGGTGTTCAGGA | |
| | GCAGCGTGCTGCACAGCACCCAGGACCTGTTCCTGCCCTTCTTCAGCA | |
| | ACGTGACCTGGTTCCACGCCATCCACGTGAGCGGCACCAACGGCACCA | |
| | AGAGGTTCGACAACCCCGTGCTGCCCTTCAACGACGGCGTGTACTTCG | |
| | CCAGCACCGAGAAGAGCAACATCATCAGGGGCTGGATCTTCGGCACCA | |
| | CCCTGGACAGCAAGACCCAGAGCCTGCTGATCGTGAACAACGCCACCA | |
| | ACGTGGTGATCAAGGTGTGCGAGTTCCAGTTCTGCAACGACCCCTTCC | |
| | TGGGCGTGTACTACCACAAGAACAACAAGAGCTGGATGGAGAGCGAGT | |
| | TCAGGGTGTACAGCAGCGCCAACAACTGCACCTTCGAGTACGTGAGCC | |
| | AGCCCTTCCTGATGGACCTGGAGGGCAAGCAGGGCAACTTCAAGAACC | |
| | TGAGGGAGTTCGTGTTCAAGAACATCGACGGCTACTTCAAGATCTACAG | |
| | CAAGCACACCCCCATCAACCTGGTGAGGGACCTGCCCCAGGGCTTCAG | |
| | CGCCCTGGAGCCCCTGGTGGACCTGCCCATCGGCATCAACATCACCAG | |
| | GTTCCAGACCCTGCTGGCCCTGCACAGGAGCTACCTGACCCCCGGCG | |
| | ACAGCAGCAGCGGCTGGACCGCCGGCGCCGCCGCCTACTACGTGGGC | |
| | TACCTGCAGCCCAGGACCTTCCTGCTGAAGTACAACGAGAACGGCACC | |
| | ATCACCGACGCCGTGGACTGCGCCCTGGACCCCCTGAGCGAGACCAA | |
| | GTGCACCCTGAAGAGCTTCACCGTGGAGAAGGGCATCTACCAGACCAG | |
| | CAACTTCAGGGTGCAGCCCACCGAGAGCATCGTGAGGTTCCCCAACAT | |
| | CACCAACCTGTGCCCCTTCGGCGAGGTGTTCAACGCCACCAGGTTCGC | |
| | CAGCGTGTACGCCTGGAACAGGAAGAGGATCAGCAACTGCGTGGCCG | |
| | ACTACAGCGTGCTGTACAACAGCGCCAGCTTCAGCACCTTCAAGTGCT | |
| | ACGGCGTGAGCCCCACCAAGCTGAACGACCTGTGCTTCACCAACGTGT | |
| | ACGCCGACAGCTTCGTGATCAGGGGCGACGAGGTGAGGCAGATCGCC | |
| | CCCGGCCAGACCGGCAAGATCGCCGACTACAACTACAAGCTGCCCGA | |
| | CGACTTCACCGGCTGCGTGATCGCCTGGAACAGCAACAACCTGGACAG | |
| | CAAGGTGGGCGGCAACTACAACTACCTGTACAGGCTGTTCAGGAAGAG | |
| | CAACCTGAAGCCCTTCGAGAGGGACATCAGCACCGAGATCTACCAGGC | |
| | CGGCAGCACCCCCTGCAACGGCGTGGAGGGCTTCAACTGCTACTTCCC | |
| | CCTGCAGAGCTACGGCTTCCAGCCCACCAACGGCGTGGGCTACCAGC | |
| | CCTACAGGGTGGTGGTGCTGAGCTTCGAGCTGCTGCACGCCCCCGCC | |
| | ACCGTGTGCGGCCCCAAGAAGAGCACCAACCTGGTGAAGAACAAGTGC | |
| | GTGAACTTCAACTTCAACGGCCTGACCGGCACCGGCGTGCTGACCGAG | |
| | AGCAACAAGAAGTTCCTGCCCTTCCAGCAGTTCGGCAGGGACATCGCC | |
| | GACACCACCGACGCCGTGAGGGACCCCCAGACCCTGGAGATCCTGGA | |
| | CATCACCCCCTGCAGCTTCGGCGGCGTGAGCGTGATCACCCCCGGCA | |
| | CCAACACCAGCAACCAGGTGGCCGTGCTGTACCAGGACGTGAACTGCA | |
| | CCGAGGTGCCCGTGGCCATCCACGCCGACCAGCTGACCCCCACCTGG | |
| | AGGGTGTACAGCACCGGCAGCAACGTGTTCCAGACCAGGGCCGGCTG | |
| | CCTGATCGGCGCCGAGCACGTGAACAACAGCTACGAGTGCGACATCCC | |
| | CATCGGCGCCGGCATCTGCGCCAGCTACCAGACCCAGACCAACAGCC | |
| | CCAGGAGGGCCAGGAGCGTGGCCAGCCAGAGCATCATCGCCTACACC | |
| | ATGAGCCTGGGCGCCGAGAACAGCGTGGCCTACAGCAACAACAGCAT | |
| | CGCCATCCCCACCAACTTCACCATCAGCGTGACCACCGAGATCCTGCC | |
| | CGTGAGCATGACCAAGACCAGCGTGGACTGCACCATGTACATCTGCGG | |
| | CGACAGCACCGAGTGCAGCAACCTGCTGCTGCAGTACGGCAGCTTCTG | |
| | CACCCAGCTGAACAGGGCCCTGACCGGCATCGCCGTGGAGCAGGACA | |
| | AGAACACCCAGGAGGTGTTCGCCCAGGTGAAGCAGATCTACAAGACCC | |
| | CCCCCATCAAGGACTTCGGCGGCTTCAACTTCAGCCAGATCCTGCCCG | |
| | ACCCCAGCAAGCCCAGCAAGAGGAGCTTCATCGAGGACCTGCTGTTCA | |
| | ACAAGGTGACCCTGGCCGACGCCGGCTTCATCAAGCAGTACGGCGACT | |
| | GCCTGGGCGACATCGCCGCCAGGGACCTGATCTGCGCCCAGAAGTTC | |
| | AACGGCCTGACCGTGCTGCCCCCCCTGCTGACCGACGAGATGATCGC | |
| | CCAGTACACCAGCGCCCTGCTGGCCGGCACCATCACCAGCGGCTGGA | |
| | CCTTCGGCGCCGGCGCCGCCCTGCAGATCCCCTTCGCCATGCAGATG | |
| | GCCTACAGGTTCAACGGCATCGGCGTGACCCAGAACGTGCTGTACGAG | |
| | AACCAGAAGCTGATCGCCAACCAGTTCAACAGCGCCATCGGCAAGATC | |
| | CAGGACAGCCTGAGCAGCACCGCCAGCGCCCTGGGCAAGCTGCAGGA | |
| | CGTGGTGAACCAGAACGCCCAGGCCCTGAACACCCTGGTGAAGCAGC | |
| | TGAGCAGCAACTTCGGCGCCATCAGCAGCGTGCTGAACGACATCCTGA | |
| | GCAGGCTGGACCCCCCCGAGGCCGAGGTGCAGATCGACAGGCTGATC | |
| | ACCGGCAGGCTGCAGAGCCTGCAGACCTACGTGACCCAGCAGCTGAT | |
| | CAGGGCCGCCGAGATCAGGGCCAGCGCCAACCTGGCCGCCACCAAGA | |
| | TGAGCGAGTGCGTGCTGGGCCAGAGCAAGAGGGTGGACTTCTGCGGC | |
| | AAGGGCTACCACCTGATGAGCTTCCCCCAGAGCGCCCCCCACGGCGT | |
| | GGTGTTCCTGCACGTGACCTACGTGCCCGCCCAGGAGAAGAACTTCAC | |
| | CACCGCCCCCGCCATCTGCCACGACGGCAAGGCCCACTTCCCCAGGG | |
| | AGGGCGTGTTCGTGAGCAACGGCACCCACTGGTTCGTGACCCAGAGG | |
| | AACTTCTACGAGCCCCAGATCATCACCACCGACAACACCTTCGTGAGC | |
| | GGCAACTGCGACGTGGTGATCGGCATCGTGAACAACACCGTGTACGAC | |
| | CCCCTGCAGCCCGAGCTGGACAGCTTCAAGGAGGAGCTGGACAAGTA | |
| | CTTCAAGAACCACACCAGCCCCGACGTGGACCTGGGCGACATCAGCG | |
| | GCATCAACGCCAGCGTGGTGAACATCCAGAAGGAGATCGACAGGCTGA | |
| | ACGAGGTGGCCAAGAACCTGAACGAGAGCCTGATCGACCTGCAGGAG | |
| | CTGGGCAAGTACGAGCAGTACATCAAGTGGCCCTGGTACATCTGGCTG | |
| | GGCTTCATCGCCGGCCTGATCGCCATCGTGATGGTGACCATCATGCTG | |
| | TGCTGCATGACCAGCTGCTGCAGCTGCCTGAAGGGCTGCTGCAGCTGC | |
| | GGCAGCTGCTGCAAGTTCGACGAGGACGACAGCGAGCCCGTGCTGAA | |
| | GGGCGTGAAGCTGCACTACACCGGAAGCGGAGCCACGAACTTCTCTCT | |
| | GTTAAAGCAAGCAGGAGATGTTGAAGAAAACCCCGGGCCTAGCAGCCA | |
| | GGCCTGGCAGCCCGGCGTGGCCATGCCCAACCTGTACAAGATGCAGA | |
| | GGATGCTGCTGGAGAAGTGCGACCTGCAGAACTACGGCGACAGCGCC | |
| | ACCCTGCCCAAGGGCATCATGATGAACGTGGCCAAGTACACCCAGCTG | |
| | TGCCAGTACCTGAACACCCTGACCCTGGCCGTGCCCTACAACATGAGG | |
| | GTGATCCACTTCGGCGCCGGCAGCGACAAGGGCGTGGCCCCCGGCAC | |
| | CGCCGTGCTGAGGCAGTGGCTGCCCACCGGCACCCTGCTGGTGGACA | |
| | GCGACCTGAACGACTTCGTGAGCGACGCCGACAGCACCCTGATCGGC | |
| | GACTGCGCCACCGTGCACACCGCCAACAAGTGGGACCTGATCATCAGC | |
| | GACATGTACGACCCCAAGACCAAGAACGTGACCAAGGAGAACGACAGC | |
| | AAGGAGGGCTTCTTCACCTACATCTGCGGCTTCATCCAGCAGAAGCTG | |
| | GCCCTGGGCGGCAGCGTGGCCATCAAGATCACCGAGCACAGCTGGAA | |
| | CGCCGACCTGTACAAGCTGATGGGCCACTTCGCCTGGTGGACCGCCTT | |
| | CGTGACCAACGTGAACGCCAGCAGCAGCGAGGCCTTCCTGATCGGCT | |
| | GCAACTACCTGGGCAAGCCCAGGGAGCAGATCGACGGCTACGTGATG | |
| | CACGCCAACTACATCTTCTGGAGGAACACCAACCCCATCCAGCTGAGC | |
| | AGCTACAGCCTGTTCGACATGAGCAAGTTCCCCCTGAAGCTGAGGGGC | |
| | ACCGCCGTGATGAGCCTGAAGGAGGGCCAGATCAACGACATGATCCTG | |
| | AGCCTGCTGAGCAAGGGCAGGCTGATCATCAGGGAGAACAACAGGGT | |
| | GGTGATCAGCAGCGACGTGCTGGTGAACAACTGATGACTCGAGCTGGT | |
| | ACTGCATGCACGCAATGCTAGCTGCCCCTTTCCCGTCCTGGGTACCCC | |
| | GAGTCTCCCCCGACCTCGGGTCCCAGGTATGCTCCCACCTCCACCTGC | |
| | CCCACTCACCACCTCTGCTAGTTCCAGACACCTCCCAAGCACGCAGCA | |
| | ATGCAGCTCAAAACGCTTAGCCTAGCCACACCCCCACGGGAAACAGCA | |
| | GTGATTAACCTTTAGCAATAAACGAAAGTTTAACTAAGCTATACTAACCC | |
| | CAGGGTTGGTCAATTTCGTGCCAGCCACACCCTGGAGCTAGCAAAAAA | |
| | AA | |
| 19 | TAGTTATTAATAGTAATCAATTACGGGGTCATTAGTTCATAGCCCATATA | 304 |
| Ad5-Pan-CoV | TGGAGTTCCGCGTTACATAACTTACGGTAAATGGCCCGCCTGGCTGAC | |
| HexaPro- | CGCCCAACGACCCCCGCCCATTGACGTCAATAATGACGTATGTTCCCAT | |
| NSP16 | AGTAACGCCAATAGGGACTTTCCATTGACGTCAATGGGTGGAGTATTTA | |
| | CGGTAAACTGCCCACTTGGCAGTACATCAAGTGTATCATATGCCAAGTA | |
| | CGCCCCCTATTGACGTCAATGACGGTAAATGGCCCGCCTGGCATTATG | |
| | CCCAGTACATGACCTTATGGGACTTTCCTACTTGGCAGTACATCTACGT | |
| | ATTAGTCATCGCTATTACCATGGTGATGCGGTTTTGGCAGTACATCAAT | |
| | GGGCGTGGATAGCGGTTTGACTCACGGGGATTTCCAAGTCTCCACCCC | |
| | ATTGACGTCAATGGGAGTTTGTTTTGGCACCAAAATCAACGGGACTTTC | |
| | CAAAATGTCGTAACAACTCCGCCCCATTGACGCAAATGGGCGGTAGGC | |
| | GTGTACGGTGGGAGGTCTATATAAGCAGAGCTGGTTTAGTGAACCGTC | |
| | AGATCGAGAATAAACTAGTATTCTTCTGGTCCCCACAGACTCAGAGAGA | |
| | ACCCGCCACCATGTTCGTGTTCCTGGTGCTGCTGCCCCTGGTGAGCAG | |
| | CCAGTGCGTGAACCTGACCACCAGGACCCAGCTGCCCCCCGCCTACA | |
| | CCAACAGCTTCACCAGGGGCGTGTACTACCCCGACAAGGTGTTCAGGA | |
| | GCAGCGTGCTGCACAGCACCCAGGACCTGTTCCTGCCCTTCTTCAGCA | |
| | ACGTGACCTGGTTCCACGCCATCCACGTGAGCGGCACCAACGGCACCA | |
| | AGAGGTTCGACAACCCCGTGCTGCCCTTCAACGACGGCGTGTACTTCG | |
| | CCAGCACCGAGAAGAGCAACATCATCAGGGGCTGGATCTTCGGCACCA | |
| | CCCTGGACAGCAAGACCCAGAGCCTGCTGATCGTGAACAACGCCACCA | |
| | ACGTGGTGATCAAGGTGTGCGAGTTCCAGTTCTGCAACGACCCCTTCC | |
| | TGGGCGTGTACTACCACAAGAACAACAAGAGCTGGATGGAGAGCGAGT | |
| | TCAGGGTGTACAGCAGCGCCAACAACTGCACCTTCGAGTACGTGAGCC | |
| | AGCCCTTCCTGATGGACCTGGAGGGCAAGCAGGGCAACTTCAAGAACC | |
| | TGAGGGAGTTCGTGTTCAAGAACATCGACGGCTACTTCAAGATCTACAG | |
| | CAAGCACACCCCCATCAACCTGGTGAGGGACCTGCCCCAGGGCTTCAG | |
| | CGCCCTGGAGCCCCTGGTGGACCTGCCCATCGGCATCAACATCACCAG | |
| | GTTCCAGACCCTGCTGGCCCTGCACAGGAGCTACCTGACCCCCGGCG | |
| | ACAGCAGCAGCGGCTGGACCGCCGGCGCCGCCGCCTACTACGTGGGC | |
| | TACCTGCAGCCCAGGACCTTCCTGCTGAAGTACAACGAGAACGGCACC | |
| | ATCACCGACGCCGTGGACTGCGCCCTGGACCCCCTGAGCGAGACCAA | |
| | GTGCACCCTGAAGAGCTTCACCGTGGAGAAGGGCATCTACCAGACCAG | |
| | CAACTTCAGGGTGCAGCCCACCGAGAGCATCGTGAGGTTCCCCAACAT | |
| | CACCAACCTGTGCCCCTTCGGCGAGGTGTTCAACGCCACCAGGTTCGC | |
| | CAGCGTGTACGCCTGGAACAGGAAGAGGATCAGCAACTGCGTGGCCG | |
| | ACTACAGCGTGCTGTACAACAGCGCCAGCTTCAGCACCTTCAAGTGCT | |
| | ACGGCGTGAGCCCCACCAAGCTGAACGACCTGTGCTTCACCAACGTGT | |
| | ACGCCGACAGCTTCGTGATCAGGGGCGACGAGGTGAGGCAGATCGCC | |
| | CCCGGCCAGACCGGCAAGATCGCCGACTACAACTACAAGCTGCCCGA | |
| | CGACTTCACCGGCTGCGTGATCGCCTGGAACAGCAACAACCTGGACAG | |
| | CAAGGTGGGCGGCAACTACAACTACCTGTACAGGCTGTTCAGGAAGAG | |
| | CAACCTGAAGCCCTTCGAGAGGGACATCAGCACCGAGATCTACCAGGC | |
| | CGGCAGCACCCCCTGCAACGGCGTGGAGGGCTTCAACTGCTACTTCCC | |
| | CCTGCAGAGCTACGGCTTCCAGCCCACCAACGGCGTGGGCTACCAGC | |
| | CCTACAGGGTGGTGGTGCTGAGCTTCGAGCTGCTGCACGCCCCCGCC | |
| | ACCGTGTGCGGCCCCAAGAAGAGCACCAACCTGGTGAAGAACAAGTGC | |
| | GTGAACTTCAACTTCAACGGCCTGACCGGCACCGGCGTGCTGACCGAG | |
| | AGCAACAAGAAGTTCCTGCCCTTCCAGCAGTTCGGCAGGGACATCGCC | |
| | GACACCACCGACGCCGTGAGGGACCCCCAGACCCTGGAGATCCTGGA | |
| | CATCACCCCCTGCAGCTTCGGCGGCGTGAGCGTGATCACCCCCGGCA | |
| | CCAACACCAGCAACCAGGTGGCCGTGCTGTACCAGGACGTGAACTGCA | |
| | CCGAGGTGCCCGTGGCCATCCACGCCGACCAGCTGACCCCCACCTGG | |
| | AGGGTGTACAGCACCGGCAGCAACGTGTTCCAGACCAGGGCCGGCTG | |
| | CCTGATCGGCGCCGAGCACGTGAACAACAGCTACGAGTGCGACATCCC | |
| | CATCGGCGCCGGCATCTGCGCCAGCTACCAGACCCAGACCAACAGCC | |
| | CCGGCAGCGCCAGCAGCGTGGCCAGCCAGAGCATCATCGCCTACACC | |
| | ATGAGCCTGGGCGCCGAGAACAGCGTGGCCTACAGCAACAACAGCAT | |
| | CGCCATCCCCACCAACTTCACCATCAGCGTGACCACCGAGATCCTGCC | |
| | CGTGAGCATGACCAAGACCAGCGTGGACTGCACCATGTACATCTGCGG | |
| | CGACAGCACCGAGTGCAGCAACCTGCTGCTGCAGTACGGCAGCTTCTG | |
| | CACCCAGCTGAACAGGGCCCTGACCGGCATCGCCGTGGAGCAGGACA | |
| | AGAACACCCAGGAGGTGTTCGCCCAGGTGAAGCAGATCTACAAGACCC | |
| | CCCCCATCAAGGACTTCGGCGGCTTCAACTTCAGCCAGATCCTGCCCG | |
| | ACCCCAGCAAGCCCAGCAAGAGGAGCCCCATCGAGGACCTGCTGTTCA | |
| | ACAAGGTGACCCTGGCCGACGCCGGCTTCATCAAGCAGTACGGCGACT | |
| | GCCTGGGCGACATCGCCGCCAGGGACCTGATCTGCGCCCAGAAGTTC | |
| | AACGGCCTGACCGTGCTGCCCCCCCTGCTGACCGACGAGATGATCGC | |
| | CCAGTACACCAGCGCCCTGCTGGCCGGCACCATCACCAGCGGCTGGA | |
| | CCTTCGGCGCCGGCCCCGCCCTGCAGATCCCCTTCCCCATGCAGATG | |
| | GCCTACAGGTTCAACGGCATCGGCGTGACCCAGAACGTGCTGTACGAG | |
| | AACCAGAAGCTGATCGCCAACCAGTTCAACAGCGCCATCGGCAAGATC | |
| | CAGGACAGCCTGAGCAGCACCCCCAGCGCCCTGGGCAAGCTGCAGGA | |
| | CGTGGTGAACCAGAACGCCCAGGCCCTGAACACCCTGGTGAAGCAGC | |
| | TGAGCAGCAACTTCGGCGCCATCAGCAGCGTGCTGAACGACATCCTGA | |
| | GCAGGCTGGACCCCCCCGAGGCCGAGGTGCAGATCGACAGGCTGATC | |
| | ACCGGCAGGCTGCAGAGCCTGCAGACCTACGTGACCCAGCAGCTGAT | |
| | CAGGGCCGCCGAGATCAGGGCCAGCGCCAACCTGGCCGCCACCAAGA | |
| | TGAGCGAGTGCGTGCTGGGCCAGAGCAAGAGGGTGGACTTCTGCGGC | |
| | AAGGGCTACCACCTGATGAGCTTCCCCCAGAGCGCCCCCCACGGCGT | |
| | GGTGTTCCTGCACGTGACCTACGTGCCCGCCCAGGAGAAGAACTTCAC | |
| | CACCGCCCCCGCCATCTGCCACGACGGCAAGGCCCACTTCCCCAGGG | |
| | AGGGCGTGTTCGTGAGCAACGGCACCCACTGGTTCGTGACCCAGAGG | |
| | AACTTCTACGAGCCCCAGATCATCACCACCGACAACACCTTCGTGAGC | |
| | GGCAACTGCGACGTGGTGATCGGCATCGTGAACAACACCGTGTACGAC | |
| | CCCCTGCAGCCCGAGCTGGACAGCTTCAAGGAGGAGCTGGACAAGTA | |
| | CTTCAAGAACCACACCAGCCCCGACGTGGACCTGGGCGACATCAGCG | |
| | GCATCAACGCCAGCGTGGTGAACATCCAGAAGGAGATCGACAGGCTGA | |
| | ACGAGGTGGCCAAGAACCTGAACGAGAGCCTGATCGACCTGCAGGAG | |
| | CTGGGCAAGTACGAGCAGTACATCAAGTGGCCCTGGTACATCTGGCTG | |
| | GGCTTCATCGCCGGCCTGATCGCCATCGTGATGGTGACCATCATGCTG | |
| | TGCTGCATGACCAGCTGCTGCAGCTGCCTGAAGGGCTGCTGCAGCTGC | |
| | GGCAGCTGCTGCAAGTTCGACGAGGACGACAGCGAGCCCGTGCTGAA | |
| | GGGCGTGAAGCTGCACTACACCGGAAGCGGAGCCACGAACTTCTCTCT | |
| | GTTAAAGCAAGCAGGAGATGTTGAAGAAAACCCCGGGCCTAGCAGCCA | |
| | GGCCTGGCAGCCCGGCGTGGCCATGCCCAACCTGTACAAGATGCAGA | |
| | GGATGCTGCTGGAGAAGTGCGACCTGCAGAACTACGGCGACAGCGCC | |
| | ACCCTGCCCAAGGGCATCATGATGAACGTGGCCAAGTACACCCAGCTG | |
| | TGCCAGTACCTGAACACCCTGACCCTGGCCGTGCCCTACAACATGAGG | |
| | GTGATCCACTTCGGCGCCGGCAGCGACAAGGGCGTGGCCCCCGGCAC | |
| | CGCCGTGCTGAGGCAGTGGCTGCCCACCGGCACCCTGCTGGTGGACA | |
| | GCGACCTGAACGACTTCGTGAGCGACGCCGACAGCACCCTGATCGGC | |
| | GACTGCGCCACCGTGCACACCGCCAACAAGTGGGACCTGATCATCAGC | |
| | GACATGTACGACCCCAAGACCAAGAACGTGACCAAGGAGAACGACAGC | |
| | AAGGAGGGCTTCTTCACCTACATCTGCGGCTTCATCCAGCAGAAGCTG | |
| | GCCCTGGGCGGCAGCGTGGCCATCAAGATCACCGAGCACAGCTGGAA | |
| | CGCCGACCTGTACAAGCTGATGGGCCACTTCGCCTGGTGGACCGCCTT | |
| | CGTGACCAACGTGAACGCCAGCAGCAGCGAGGCCTTCCTGATCGGCT | |
| | GCAACTACCTGGGCAAGCCCAGGGAGCAGATCGACGGCTACGTGATG | |
| | CACGCCAACTACATCTTCTGGAGGAACACCAACCCCATCCAGCTGAGC | |
| | AGCTACAGCCTGTTCGACATGAGCAAGTTCCCCCTGAAGCTGAGGGGC | |
| | ACCGCCGTGATGAGCCTGAAGGAGGGCCAGATCAACGACATGATCCTG | |
| | AGCCTGCTGAGCAAGGGCAGGCTGATCATCAGGGAGAACAACAGGGT | |
| | GGTGATCAGCAGCGACGTGCTGGTGAACAACTGATGACTCGAGCTGGT | |
| | ACTGCATGCACGCAATGCTAGCTGCCCCTTTCCCGTCCTGGGTACCCC | |
| | GAGTCTCCCCCGACCTCGGGTCCCAGGTATGCTCCCACCTCCACCTGC | |
| | CCCACTCACCACCTCTGCTAGTTCCAGACACCTCCCAAGCACGCAGCA | |
| | ATGCAGCTCAAAACGCTTAGCCTAGCCACACCCCCACGGGAAACAGCA | |
| | GTGATTAACCTTTAGCAATAAACGAAAGTTTAACTAAGCTATACTAACCC | |
| | CAGGGTTGGTCAATTTCGTGCCAGCCACACCCTGGAGCTAGCAAAAAA | |
| | AA | |
| 20 | TAGTTATTAATAGTAATCAATTACGGGGTCATTAGTTCATAGCCCATATA | 305 |
| Ad5-Pan-CoV | TGGAGTTCCGCGTTACATAACTTACGGTAAATGGCCCGCCTGGCTGAC | |
| Spike-ORF3a | CGCCCAACGACCCCCGCCCATTGACGTCAATAATGACGTATGTTCCCAT | |
| | AGTAACGCCAATAGGGACTTTCCATTGACGTCAATGGGTGGAGTATTTA | |
| | CGGTAAACTGCCCACTTGGCAGTACATCAAGTGTATCATATGCCAAGTA | |
| | CGCCCCCTATTGACGTCAATGACGGTAAATGGCCCGCCTGGCATTATG | |
| | CCCAGTACATGACCTTATGGGACTTTCCTACTTGGCAGTACATCTACGT | |
| | ATTAGTCATCGCTATTACCATGGTGATGCGGTTTTGGCAGTACATCAAT | |
| | GGGCGTGGATAGCGGTTTGACTCACGGGGATTTCCAAGTCTCCACCCC | |
| | ATTGACGTCAATGGGAGTTTGTTTTGGCACCAAAATCAACGGGACTTTC | |
| | CAAAATGTCGTAACAACTCCGCCCCATTGACGCAAATGGGCGGTAGGC | |
| | GTGTACGGTGGGAGGTCTATATAAGCAGAGCTGGTTTAGTGAACCGTC | |
| | AGATCGAGAATAAACTAGTATTCTTCTGGTCCCCACAGACTCAGAGAGA | |
| | ACCCGCCACCATGTTCGTGTTCCTGGTGCTGCTGCCCCTGGTGAGCAG | |
| | CCAGTGCGTGAACCTGACCACCAGGACCCAGCTGCCCCCCGCCTACA | |
| | CCAACAGCTTCACCAGGGGCGTGTACTACCCCGACAAGGTGTTCAGGA | |
| | GCAGCGTGCTGCACAGCACCCAGGACCTGTTCCTGCCCTTCTTCAGCA | |
| | ACGTGACCTGGTTCCACGCCATCCACGTGAGCGGCACCAACGGCACCA | |
| | AGAGGTTCGACAACCCCGTGCTGCCCTTCAACGACGGCGTGTACTTCG | |
| | CCAGCACCGAGAAGAGCAACATCATCAGGGGCTGGATCTTCGGCACCA | |
| | CCCTGGACAGCAAGACCCAGAGCCTGCTGATCGTGAACAACGCCACCA | |
| | ACGTGGTGATCAAGGTGTGCGAGTTCCAGTTCTGCAACGACCCCTTCC | |
| | TGGGCGTGTACTACCACAAGAACAACAAGAGCTGGATGGAGAGCGAGT | |
| | TCAGGGTGTACAGCAGCGCCAACAACTGCACCTTCGAGTACGTGAGCC | |
| | AGCCCTTCCTGATGGACCTGGAGGGCAAGCAGGGCAACTTCAAGAACC | |
| | TGAGGGAGTTCGTGTTCAAGAACATCGACGGCTACTTCAAGATCTACAG | |
| | CAAGCACACCCCCATCAACCTGGTGAGGGACCTGCCCCAGGGCTTCAG | |
| | CGCCCTGGAGCCCCTGGTGGACCTGCCCATCGGCATCAACATCACCAG | |
| | GTTCCAGACCCTGCTGGCCCTGCACAGGAGCTACCTGACCCCCGGCG | |
| | ACAGCAGCAGCGGCTGGACCGCCGGCGCCGCCGCCTACTACGTGGGC | |
| | TACCTGCAGCCCAGGACCTTCCTGCTGAAGTACAACGAGAACGGCACC | |
| | ATCACCGACGCCGTGGACTGCGCCCTGGACCCCCTGAGCGAGACCAA | |
| | GTGCACCCTGAAGAGCTTCACCGTGGAGAAGGGCATCTACCAGACCAG | |
| | CAACTTCAGGGTGCAGCCCACCGAGAGCATCGTGAGGTTCCCCAACAT | |
| | CACCAACCTGTGCCCCTTCGGCGAGGTGTTCAACGCCACCAGGTTCGC | |
| | CAGCGTGTACGCCTGGAACAGGAAGAGGATCAGCAACTGCGTGGCCG | |
| | ACTACAGCGTGCTGTACAACAGCGCCAGCTTCAGCACCTTCAAGTGCT | |
| | ACGGCGTGAGCCCCACCAAGCTGAACGACCTGTGCTTCACCAACGTGT | |
| | ACGCCGACAGCTTCGTGATCAGGGGCGACGAGGTGAGGCAGATCGCC | |
| | CCCGGCCAGACCGGCAAGATCGCCGACTACAACTACAAGCTGCCCGA | |
| | CGACTTCACCGGCTGCGTGATCGCCTGGAACAGCAACAACCTGGACAG | |
| | CAAGGTGGGCGGCAACTACAACTACCTGTACAGGCTGTTCAGGAAGAG | |
| | CAACCTGAAGCCCTTCGAGAGGGACATCAGCACCGAGATCTACCAGGC | |
| | CGGCAGCACCCCCTGCAACGGCGTGGAGGGCTTCAACTGCTACTTCCC | |
| | CCTGCAGAGCTACGGCTTCCAGCCCACCAACGGCGTGGGCTACCAGC | |
| | CCTACAGGGTGGTGGTGCTGAGCTTCGAGCTGCTGCACGCCCCCGCC | |
| | ACCGTGTGCGGCCCCAAGAAGAGCACCAACCTGGTGAAGAACAAGTGC | |
| | GTGAACTTCAACTTCAACGGCCTGACCGGCACCGGCGTGCTGACCGAG | |
| | AGCAACAAGAAGTTCCTGCCCTTCCAGCAGTTCGGCAGGGACATCGCC | |
| | GACACCACCGACGCCGTGAGGGACCCCCAGACCCTGGAGATCCTGGA | |
| | CATCACCCCCTGCAGCTTCGGCGGCGTGAGCGTGATCACCCCCGGCA | |
| | CCAACACCAGCAACCAGGTGGCCGTGCTGTACCAGGACGTGAACTGCA | |
| | CCGAGGTGCCCGTGGCCATCCACGCCGACCAGCTGACCCCCACCTGG | |
| | AGGGTGTACAGCACCGGCAGCAACGTGTTCCAGACCAGGGCCGGCTG | |
| | CCTGATCGGCGCCGAGCACGTGAACAACAGCTACGAGTGCGACATCCC | |
| | CATCGGCGCCGGCATCTGCGCCAGCTACCAGACCCAGACCAACAGCC | |
| | CCAGGAGGGCCAGGAGCGTGGCCAGCCAGAGCATCATCGCCTACACC | |
| | ATGAGCCTGGGCGCCGAGAACAGCGTGGCCTACAGCAACAACAGCAT | |
| | CGCCATCCCCACCAACTTCACCATCAGCGTGACCACCGAGATCCTGCC | |
| | CGTGAGCATGACCAAGACCAGCGTGGACTGCACCATGTACATCTGCGG | |
| | CGACAGCACCGAGTGCAGCAACCTGCTGCTGCAGTACGGCAGCTTCTG | |
| | CACCCAGCTGAACAGGGCCCTGACCGGCATCGCCGTGGAGCAGGACA | |
| | AGAACACCCAGGAGGTGTTCGCCCAGGTGAAGCAGATCTACAAGACCC | |
| | CCCCCATCAAGGACTTCGGCGGCTTCAACTTCAGCCAGATCCTGCCCG | |
| | ACCCCAGCAAGCCCAGCAAGAGGAGCTTCATCGAGGACCTGCTGTTCA | |
| | ACAAGGTGACCCTGGCCGACGCCGGCTTCATCAAGCAGTACGGCGACT | |
| | GCCTGGGCGACATCGCCGCCAGGGACCTGATCTGCGCCCAGAAGTTC | |
| | AACGGCCTGACCGTGCTGCCCCCCCTGCTGACCGACGAGATGATCGC | |
| | CCAGTACACCAGCGCCCTGCTGGCCGGCACCATCACCAGCGGCTGGA | |
| | CCTTCGGCGCCGGCGCCGCCCTGCAGATCCCCTTCGCCATGCAGATG | |
| | GCCTACAGGTTCAACGGCATCGGCGTGACCCAGAACGTGCTGTACGAG | |
| | AACCAGAAGCTGATCGCCAACCAGTTCAACAGCGCCATCGGCAAGATC | |
| | CAGGACAGCCTGAGCAGCACCGCCAGCGCCCTGGGCAAGCTGCAGGA | |
| | CGTGGTGAACCAGAACGCCCAGGCCCTGAACACCCTGGTGAAGCAGC | |
| | TGAGCAGCAACTTCGGCGCCATCAGCAGCGTGCTGAACGACATCCTGA | |
| | GCAGGCTGGACCCCCCCGAGGCCGAGGTGCAGATCGACAGGCTGATC | |
| | ACCGGCAGGCTGCAGAGCCTGCAGACCTACGTGACCCAGCAGCTGAT | |
| | CAGGGCCGCCGAGATCAGGGCCAGCGCCAACCTGGCCGCCACCAAGA | |
| | TGAGCGAGTGCGTGCTGGGCCAGAGCAAGAGGGTGGACTTCTGCGGC | |
| | AAGGGCTACCACCTGATGAGCTTCCCCCAGAGCGCCCCCCACGGCGT | |
| | GGTGTTCCTGCACGTGACCTACGTGCCCGCCCAGGAGAAGAACTTCAC | |
| | CACCGCCCCCGCCATCTGCCACGACGGCAAGGCCCACTTCCCCAGGG | |
| | AGGGCGTGTTCGTGAGCAACGGCACCCACTGGTTCGTGACCCAGAGG | |
| | AACTTCTACGAGCCCCAGATCATCACCACCGACAACACCTTCGTGAGC | |
| | GGCAACTGCGACGTGGTGATCGGCATCGTGAACAACACCGTGTACGAC | |
| | CCCCTGCAGCCCGAGCTGGACAGCTTCAAGGAGGAGCTGGACAAGTA | |
| | CTTCAAGAACCACACCAGCCCCGACGTGGACCTGGGCGACATCAGCG | |
| | GCATCAACGCCAGCGTGGTGAACATCCAGAAGGAGATCGACAGGCTGA | |
| | ACGAGGTGGCCAAGAACCTGAACGAGAGCCTGATCGACCTGCAGGAG | |
| | CTGGGCAAGTACGAGCAGTACATCAAGTGGCCCTGGTACATCTGGCTG | |
| | GGCTTCATCGCCGGCCTGATCGCCATCGTGATGGTGACCATCATGCTG | |
| | TGCTGCATGACCAGCTGCTGCAGCTGCCTGAAGGGCTGCTGCAGCTGC | |
| | GGCAGCTGCTGCAAGTTCGACGAGGACGACAGCGAGCCCGTGCTGAA | |
| | GGGCGTGAAGCTGCACTACACCGGAAGCGGAGCCACGAACTTCTCTCT | |
| | GTTAAAGCAAGCAGGAGATGTTGAAGAAAACCCCGGGCCTATGGACCT | |
| | GTTCATGAGGATCTTCACCATCGGCACCGTGACCCTGAAGCAGGGCGA | |
| | GATCAAGGACGCCACCCCCAGCGACTTCGTGAGGGCCACCGCCACCA | |
| | TCCCCATCCAGGCCAGCCTGCCCTTCGGCTGGCTGATCGTGGGCGTG | |
| | GCCCTGCTGGCCGTGTTCCAGAGCGCCAGCAAGATCATCACCCTGAAG | |
| | AAGAGGTGGCAGCTGGCCCTGAGCAAGGGCGTGCACTTCGTGTGCAA | |
| | CCTGCTGCTGCTGTTCGTGACCGTGTACAGCCACCTGCTGCTGGTGGC | |
| | CGCCGGCCTGGAGGCCCCCTTCCTGTACCTGTACGCCCTGGTGTACTT | |
| | CCTGCAGAGCATCAACTTCGTGAGGATCATCATGAGGCTGTGGCTGTG | |
| | CTGGAAGTGCAGGAGCAAGAACCCCCTGCTGTACGACGCCAACTACTT | |
| | CCTGTGCTGGCACACCAACTGCTACGACTACTGCATCCCCTACAACAG | |
| | CGTGACCAGCAGCATCGTGATCACCAGCGGCGACGGCACCACCAGCC | |
| | CCATCAGCGAGCACGACTACCAGATCGGCGGCTACACCGAGAAGTGG | |
| | GAGAGCGGCGTGAAGGACTGCGTGGTGCTGCACAGCTACTTCACCAG | |
| | CGACTACTACCAGCTGTACAGCACCCAGCTGAGCACCGACACCGGCGT | |
| | GGAGCACGTGACCTTCTTCATCTACAACAAGATCGTGGACGAGCCCGA | |
| | GGAGCACGTGCAGATCCACACCATCGACGGCAGCAGCGGCGTGGTGA | |
| | ACCCCGTGATGGAGCCCATCTACGACGAGCCCACCACCACCACCAGC | |
| | GTGCCCCTGTGATGACTCGAGCTGGTACTGCATGCACGCAATGCTAGC | |
| | TGCCCCTTTCCCGTCCTGGGTACCCCGAGTCTCCCCCGACCTCGGGTC | |
| | CCAGGTATGCTCCCACCTCCACCTGCCCCACTCACCACCTCTGCTAGTT | |
| | CCAGACACCTCCCAAGCACGCAGCAATGCAGCTCAAAACGCTTAGCCT | |
| | AGCCACACCCCCACGGGAAACAGCAGTGATTAACCTTTAGCAATAAAC | |
| | GAAAGTTTAACTAAGCTATACTAACCCCAGGGTTGGTCAATTTCGTGCC | |
| | AGCCACACCCTGGAGCTAGCAAAAAAAA | |
| 21 | TAGTTATTAATAGTAATCAATTACGGGGTCATTAGTTCATAGCCCATATA | 306 |
| Ad5-Pan-CoV | TGGAGTTCCGCGTTACATAACTTACGGTAAATGGCCCGCCTGGCTGAC | |
| HexaPro- | CGCCCAACGACCCCCGCCCATTGACGTCAATAATGACGTATGTTCCCAT | |
| ORF3a | AGTAACGCCAATAGGGACTTTCCATTGACGTCAATGGGTGGAGTATTTA | |
| | CGGTAAACTGCCCACTTGGCAGTACATCAAGTGTATCATATGCCAAGTA | |
| | CGCCCCCTATTGACGTCAATGACGGTAAATGGCCCGCCTGGCATTATG | |
| | CCCAGTACATGACCTTATGGGACTTTCCTACTTGGCAGTACATCTACGT | |
| | ATTAGTCATCGCTATTACCATGGTGATGCGGTTTTGGCAGTACATCAAT | |
| | GGGCGTGGATAGCGGTTTGACTCACGGGGATTTCCAAGTCTCCACCCC | |
| | ATTGACGTCAATGGGAGTTTGTTTTGGCACCAAAATCAACGGGACTTTC | |
| | CAAAATGTCGTAACAACTCCGCCCCATTGACGCAAATGGGCGGTAGGC | |
| | GTGTACGGTGGGAGGTCTATATAAGCAGAGCTGGTTTAGTGAACCGTC | |
| | AGATCGAGAATAAACTAGTATTCTTCTGGTCCCCACAGACTCAGAGAGA | |
| | ACCCGCCACCATGTTCGTGTTCCTGGTGCTGCTGCCCCTGGTGAGCAG | |
| | CCAGTGCGTGAACCTGACCACCAGGACCCAGCTGCCCCCCGCCTACA | |
| | CCAACAGCTTCACCAGGGGCGTGTACTACCCCGACAAGGTGTTCAGGA | |
| | GCAGCGTGCTGCACAGCACCCAGGACCTGTTCCTGCCCTTCTTCAGCA | |
| | ACGTGACCTGGTTCCACGCCATCCACGTGAGCGGCACCAACGGCACCA | |
| | AGAGGTTCGACAACCCCGTGCTGCCCTTCAACGACGGCGTGTACTTCG | |
| | CCAGCACCGAGAAGAGCAACATCATCAGGGGCTGGATCTTCGGCACCA | |
| | CCCTGGACAGCAAGACCCAGAGCCTGCTGATCGTGAACAACGCCACCA | |
| | ACGTGGTGATCAAGGTGTGCGAGTTCCAGTTCTGCAACGACCCCTTCC | |
| | TGGGCGTGTACTACCACAAGAACAACAAGAGCTGGATGGAGAGCGAGT | |
| | TCAGGGTGTACAGCAGCGCCAACAACTGCACCTTCGAGTACGTGAGCC | |
| | AGCCCTTCCTGATGGACCTGGAGGGCAAGCAGGGCAACTTCAAGAACC | |
| | TGAGGGAGTTCGTGTTCAAGAACATCGACGGCTACTTCAAGATCTACAG | |
| | CAAGCACACCCCCATCAACCTGGTGAGGGACCTGCCCCAGGGCTTCAG | |
| | CGCCCTGGAGCCCCTGGTGGACCTGCCCATCGGCATCAACATCACCAG | |
| | GTTCCAGACCCTGCTGGCCCTGCACAGGAGCTACCTGACCCCCGGCG | |
| | ACAGCAGCAGCGGCTGGACCGCCGGCGCCGCCGCCTACTACGTGGGC | |
| | TACCTGCAGCCCAGGACCTTCCTGCTGAAGTACAACGAGAACGGCACC | |
| | ATCACCGACGCCGTGGACTGCGCCCTGGACCCCCTGAGCGAGACCAA | |
| | GTGCACCCTGAAGAGCTTCACCGTGGAGAAGGGCATCTACCAGACCAG | |
| | CAACTTCAGGGTGCAGCCCACCGAGAGCATCGTGAGGTTCCCCAACAT | |
| | CACCAACCTGTGCCCCTTCGGCGAGGTGTTCAACGCCACCAGGTTCGC | |
| | CAGCGTGTACGCCTGGAACAGGAAGAGGATCAGCAACTGCGTGGCCG | |
| | ACTACAGCGTGCTGTACAACAGCGCCAGCTTCAGCACCTTCAAGTGCT | |
| | ACGGCGTGAGCCCCACCAAGCTGAACGACCTGTGCTTCACCAACGTGT | |
| | ACGCCGACAGCTTCGTGATCAGGGGCGACGAGGTGAGGCAGATCGCC | |
| | CCCGGCCAGACCGGCAAGATCGCCGACTACAACTACAAGCTGCCCGA | |
| | CGACTTCACCGGCTGCGTGATCGCCTGGAACAGCAACAACCTGGACAG | |
| | CAAGGTGGGCGGCAACTACAACTACCTGTACAGGCTGTTCAGGAAGAG | |
| | CAACCTGAAGCCCTTCGAGAGGGACATCAGCACCGAGATCTACCAGGC | |
| | CGGCAGCACCCCCTGCAACGGCGTGGAGGGCTTCAACTGCTACTTCCC | |
| | CCTGCAGAGCTACGGCTTCCAGCCCACCAACGGCGTGGGCTACCAGC | |
| | CCTACAGGGTGGTGGTGCTGAGCTTCGAGCTGCTGCACGCCCCCGCC | |
| | ACCGTGTGCGGCCCCAAGAAGAGCACCAACCTGGTGAAGAACAAGTGC | |
| | GTGAACTTCAACTTCAACGGCCTGACCGGCACCGGCGTGCTGACCGAG | |
| | AGCAACAAGAAGTTCCTGCCCTTCCAGCAGTTCGGCAGGGACATCGCC | |
| | GACACCACCGACGCCGTGAGGGACCCCCAGACCCTGGAGATCCTGGA | |
| | CATCACCCCCTGCAGCTTCGGCGGCGTGAGCGTGATCACCCCCGGCA | |
| | CCAACACCAGCAACCAGGTGGCCGTGCTGTACCAGGACGTGAACTGCA | |
| | CCGAGGTGCCCGTGGCCATCCACGCCGACCAGCTGACCCCCACCTGG | |
| | AGGGTGTACAGCACCGGCAGCAACGTGTTCCAGACCAGGGCCGGCTG | |
| | CCTGATCGGCGCCGAGCACGTGAACAACAGCTACGAGTGCGACATCCC | |
| | CATCGGCGCCGGCATCTGCGCCAGCTACCAGACCCAGACCAACAGCC | |
| | CCGGCAGCGCCAGCAGCGTGGCCAGCCAGAGCATCATCGCCTACACC | |
| | ATGAGCCTGGGCGCCGAGAACAGCGTGGCCTACAGCAACAACAGCAT | |
| | CGCCATCCCCACCAACTTCACCATCAGCGTGACCACCGAGATCCTGCC | |
| | CGTGAGCATGACCAAGACCAGCGTGGACTGCACCATGTACATCTGCGG | |
| | CGACAGCACCGAGTGCAGCAACCTGCTGCTGCAGTACGGCAGCTTCTG | |
| | CACCCAGCTGAACAGGGCCCTGACCGGCATCGCCGTGGAGCAGGACA | |
| | AGAACACCCAGGAGGTGTTCGCCCAGGTGAAGCAGATCTACAAGACCC | |
| | CCCCCATCAAGGACTTCGGCGGCTTCAACTTCAGCCAGATCCTGCCCG | |
| | ACCCCAGCAAGCCCAGCAAGAGGAGCCCCATCGAGGACCTGCTGTTCA | |
| | ACAAGGTGACCCTGGCCGACGCCGGCTTCATCAAGCAGTACGGCGACT | |
| | GCCTGGGCGACATCGCCGCCAGGGACCTGATCTGCGCCCAGAAGTTC | |
| | AACGGCCTGACCGTGCTGCCCCCCCTGCTGACCGACGAGATGATCGC | |
| | CCAGTACACCAGCGCCCTGCTGGCCGGCACCATCACCAGCGGCTGGA | |
| | CCTTCGGCGCCGGCCCCGCCCTGCAGATCCCCTTCCCCATGCAGATG | |
| | GCCTACAGGTTCAACGGCATCGGCGTGACCCAGAACGTGCTGTACGAG | |
| | AACCAGAAGCTGATCGCCAACCAGTTCAACAGCGCCATCGGCAAGATC | |
| | CAGGACAGCCTGAGCAGCACCCCCAGCGCCCTGGGCAAGCTGCAGGA | |
| | CGTGGTGAACCAGAACGCCCAGGCCCTGAACACCCTGGTGAAGCAGC | |
| | TGAGCAGCAACTTCGGCGCCATCAGCAGCGTGCTGAACGACATCCTGA | |
| | GCAGGCTGGACCCCCCCGAGGCCGAGGTGCAGATCGACAGGCTGATC | |
| | ACCGGCAGGCTGCAGAGCCTGCAGACCTACGTGACCCAGCAGCTGAT | |
| | CAGGGCCGCCGAGATCAGGGCCAGCGCCAACCTGGCCGCCACCAAGA | |
| | TGAGCGAGTGCGTGCTGGGCCAGAGCAAGAGGGTGGACTTCTGCGGC | |
| | AAGGGCTACCACCTGATGAGCTTCCCCCAGAGCGCCCCCCACGGCGT | |
| | GGTGTTCCTGCACGTGACCTACGTGCCCGCCCAGGAGAAGAACTTCAC | |
| | CACCGCCCCCGCCATCTGCCACGACGGCAAGGCCCACTTCCCCAGGG | |
| | AGGGCGTGTTCGTGAGCAACGGCACCCACTGGTTCGTGACCCAGAGG | |
| | AACTTCTACGAGCCCCAGATCATCACCACCGACAACACCTTCGTGAGC | |
| | GGCAACTGCGACGTGGTGATCGGCATCGTGAACAACACCGTGTACGAC | |
| | CCCCTGCAGCCCGAGCTGGACAGCTTCAAGGAGGAGCTGGACAAGTA | |
| | CTTCAAGAACCACACCAGCCCCGACGTGGACCTGGGCGACATCAGCG | |
| | GCATCAACGCCAGCGTGGTGAACATCCAGAAGGAGATCGACAGGCTGA | |
| | ACGAGGTGGCCAAGAACCTGAACGAGAGCCTGATCGACCTGCAGGAG | |
| | CTGGGCAAGTACGAGCAGTACATCAAGTGGCCCTGGTACATCTGGCTG | |
| | GGCTTCATCGCCGGCCTGATCGCCATCGTGATGGTGACCATCATGCTG | |
| | TGCTGCATGACCAGCTGCTGCAGCTGCCTGAAGGGCTGCTGCAGCTGC | |
| | GGCAGCTGCTGCAAGTTCGACGAGGACGACAGCGAGCCCGTGCTGAA | |
| | GGGCGTGAAGCTGCACTACACCGGAAGCGGAGCCACGAACTTCTCTCT | |
| | GTTAAAGCAAGCAGGAGATGTTGAAGAAAACCCCGGGCCTATGGACCT | |
| | GTTCATGAGGATCTTCACCATCGGCACCGTGACCCTGAAGCAGGGCGA | |
| | GATCAAGGACGCCACCCCCAGCGACTTCGTGAGGGCCACCGCCACCA | |
| | TCCCCATCCAGGCCAGCCTGCCCTTCGGCTGGCTGATCGTGGGCGTG | |
| | GCCCTGCTGGCCGTGTTCCAGAGCGCCAGCAAGATCATCACCCTGAAG | |
| | AAGAGGTGGCAGCTGGCCCTGAGCAAGGGCGTGCACTTCGTGTGCAA | |
| | CCTGCTGCTGCTGTTCGTGACCGTGTACAGCCACCTGCTGCTGGTGGC | |
| | CGCCGGCCTGGAGGCCCCCTTCCTGTACCTGTACGCCCTGGTGTACTT | |
| | CCTGCAGAGCATCAACTTCGTGAGGATCATCATGAGGCTGTGGCTGTG | |
| | CTGGAAGTGCAGGAGCAAGAACCCCCTGCTGTACGACGCCAACTACTT | |
| | CCTGTGCTGGCACACCAACTGCTACGACTACTGCATCCCCTACAACAG | |
| | CGTGACCAGCAGCATCGTGATCACCAGCGGCGACGGCACCACCAGCC | |
| | CCATCAGCGAGCACGACTACCAGATCGGCGGCTACACCGAGAAGTGG | |
| | GAGAGCGGCGTGAAGGACTGCGTGGTGCTGCACAGCTACTTCACCAG | |
| | CGACTACTACCAGCTGTACAGCACCCAGCTGAGCACCGACACCGGCGT | |
| | GGAGCACGTGACCTTCTTCATCTACAACAAGATCGTGGACGAGCCCGA | |
| | GGAGCACGTGCAGATCCACACCATCGACGGCAGCAGCGGCGTGGTGA | |
| | ACCCCGTGATGGAGCCCATCTACGACGAGCCCACCACCACCACCAGC | |
| | GTGCCCCTGTGATGACTCGAGCTGGTACTGCATGCACGCAATGCTAGC | |
| | TGCCCCTTTCCCGTCCTGGGTACCCCGAGTCTCCCCCGACCTCGGGTC | |
| | CCAGGTATGCTCCCACCTCCACCTGCCCCACTCACCACCTCTGCTAGTT | |
| | CCAGACACCTCCCAAGCACGCAGCAATGCAGCTCAAAACGCTTAGCCT | |
| | AGCCACACCCCCACGGGAAACAGCAGTGATTAACCTTTAGCAATAAAC | |
| | GAAAGTTTAACTAAGCTATACTAACCCCAGGGTTGGTCAATTTCGTGCC | |
| | AGCCACACCCTGGAGCTAGCAAAAAAAA | |
| 22 | ATGTTCGTGTTCCTGGTGCTGCTGCCCCTGGTGAGCAGCCAGTGCGTG | 307 |
| Pan-CoV | AACCTGACCACCAGGACCCAGCTGCCCCCCGCCTACACCAACAGCTTC | |
| mRNA Spike- | ACCAGGGGCGTGTACTACCCCGACAAGGTGTTCAGGAGCAGCGTGCT | |
| NSP1-NSP2 | GCACAGCACCCAGGACCTGTTCCTGCCCTTCTTCAGCAACGTGACCTG | |
| | GTTCCACGCCATCCACGTGAGCGGCACCAACGGCACCAAGAGGTTCGA | |
| | CAACCCCGTGCTGCCCTTCAACGACGGCGTGTACTTCGCCAGCACCGA | |
| | GAAGAGCAACATCATCAGGGGCTGGATCTTCGGCACCACCCTGGACAG | |
| | CAAGACCCAGAGCCTGCTGATCGTGAACAACGCCACCAACGTGGTGAT | |
| | CAAGGTGTGCGAGTTCCAGTTCTGCAACGACCCCTTCCTGGGCGTGTA | |
| | CTACCACAAGAACAACAAGAGCTGGATGGAGAGCGAGTTCAGGGTGTA | |
| | CAGCAGCGCCAACAACTGCACCTTCGAGTACGTGAGCCAGCCCTTCCT | |
| | GATGGACCTGGAGGGCAAGCAGGGCAACTTCAAGAACCTGAGGGAGT | |
| | TCGTGTTCAAGAACATCGACGGCTACTTCAAGATCTACAGCAAGCACAC | |
| | CCCCATCAACCTGGTGAGGGACCTGCCCCAGGGCTTCAGCGCCCTGG | |
| | AGCCCCTGGTGGACCTGCCCATCGGCATCAACATCACCAGGTTCCAGA | |
| | CCCTGCTGGCCCTGCACAGGAGCTACCTGACCCCCGGCGACAGCAGC | |
| | AGCGGCTGGACCGCCGGCGCCGCCGCCTACTACGTGGGCTACCTGCA | |
| | GCCCAGGACCTTCCTGCTGAAGTACAACGAGAACGGCACCATCACCGA | |
| | CGCCGTGGACTGCGCCCTGGACCCCCTGAGCGAGACCAAGTGCACCC | |
| | TGAAGAGCTTCACCGTGGAGAAGGGCATCTACCAGACCAGCAACTTCA | |
| | GGGTGCAGCCCACCGAGAGCATCGTGAGGTTCCCCAACATCACCAACC | |
| | TGTGCCCCTTCGGCGAGGTGTTCAACGCCACCAGGTTCGCCAGCGTGT | |
| | ACGCCTGGAACAGGAAGAGGATCAGCAACTGCGTGGCCGACTACAGC | |
| | GTGCTGTACAACAGCGCCAGCTTCAGCACCTTCAAGTGCTACGGCGTG | |
| | AGCCCCACCAAGCTGAACGACCTGTGCTTCACCAACGTGTACGCCGAC | |
| | AGCTTCGTGATCAGGGGCGACGAGGTGAGGCAGATCGCCCCCGGCCA | |
| | GACCGGCAAGATCGCCGACTACAACTACAAGCTGCCCGACGACTTCAC | |
| | CGGCTGCGTGATCGCCTGGAACAGCAACAACCTGGACAGCAAGGTGG | |
| | GCGGCAACTACAACTACCTGTACAGGCTGTTCAGGAAGAGCAACCTGA | |
| | AGCCCTTCGAGAGGGACATCAGCACCGAGATCTACCAGGCCGGCAGC | |
| | ACCCCCTGCAACGGCGTGGAGGGCTTCAACTGCTACTTCCCCCTGCAG | |
| | AGCTACGGCTTCCAGCCCACCAACGGCGTGGGCTACCAGCCCTACAG | |
| | GGTGGTGGTGCTGAGCTTCGAGCTGCTGCACGCCCCCGCCACCGTGT | |
| | GCGGCCCCAAGAAGAGCACCAACCTGGTGAAGAACAAGTGCGTGAACT | |
| | TCAACTTCAACGGCCTGACCGGCACCGGCGTGCTGACCGAGAGCAACA | |
| | AGAAGTTCCTGCCCTTCCAGCAGTTCGGCAGGGACATCGCCGACACCA | |
| | CCGACGCCGTGAGGGACCCCCAGACCCTGGAGATCCTGGACATCACC | |
| | CCCTGCAGCTTCGGCGGCGTGAGCGTGATCACCCCCGGCACCAACAC | |
| | CAGCAACCAGGTGGCCGTGCTGTACCAGGACGTGAACTGCACCGAGG | |
| | TGCCCGTGGCCATCCACGCCGACCAGCTGACCCCCACCTGGAGGGTG | |
| | TACAGCACCGGCAGCAACGTGTTCCAGACCAGGGCCGGCTGCCTGAT | |
| | CGGCGCCGAGCACGTGAACAACAGCTACGAGTGCGACATCCCCATCG | |
| | GCGCCGGCATCTGCGCCAGCTACCAGACCCAGACCAACAGCCCCAGG | |
| | AGGGCCAGGAGCGTGGCCAGCCAGAGCATCATCGCCTACACCATGAG | |
| | CCTGGGCGCCGAGAACAGCGTGGCCTACAGCAACAACAGCATCGCCA | |
| | TCCCCACCAACTTCACCATCAGCGTGACCACCGAGATCCTGCCCGTGA | |
| | GCATGACCAAGACCAGCGTGGACTGCACCATGTACATCTGCGGCGACA | |
| | GCACCGAGTGCAGCAACCTGCTGCTGCAGTACGGCAGCTTCTGCACCC | |
| | AGCTGAACAGGGCCCTGACCGGCATCGCCGTGGAGCAGGACAAGAAC | |
| | ACCCAGGAGGTGTTCGCCCAGGTGAAGCAGATCTACAAGACCCCCCCC | |
| | ATCAAGGACTTCGGCGGCTTCAACTTCAGCCAGATCCTGCCCGACCCC | |
| | AGCAAGCCCAGCAAGAGGAGCTTCATCGAGGACCTGCTGTTCAACAAG | |
| | GTGACCCTGGCCGACGCCGGCTTCATCAAGCAGTACGGCGACTGCCT | |
| | GGGCGACATCGCCGCCAGGGACCTGATCTGCGCCCAGAAGTTCAACG | |
| | GCCTGACCGTGCTGCCCCCCCTGCTGACCGACGAGATGATCGCCCAG | |
| | TACACCAGCGCCCTGCTGGCCGGCACCATCACCAGCGGCTGGACCTT | |
| | CGGCGCCGGCGCCGCCCTGCAGATCCCCTTCGCCATGCAGATGGCCT | |
| | ACAGGTTCAACGGCATCGGCGTGACCCAGAACGTGCTGTACGAGAACC | |
| | AGAAGCTGATCGCCAACCAGTTCAACAGCGCCATCGGCAAGATCCAGG | |
| | ACAGCCTGAGCAGCACCGCCAGCGCCCTGGGCAAGCTGCAGGACGTG | |
| | GTGAACCAGAACGCCCAGGCCCTGAACACCCTGGTGAAGCAGCTGAG | |
| | CAGCAACTTCGGCGCCATCAGCAGCGTGCTGAACGACATCCTGAGCAG | |
| | GCTGGACCCCCCCGAGGCCGAGGTGCAGATCGACAGGCTGATCACCG | |
| | GCAGGCTGCAGAGCCTGCAGACCTACGTGACCCAGCAGCTGATCAGG | |
| | GCCGCCGAGATCAGGGCCAGCGCCAACCTGGCCGCCACCAAGATGAG | |
| | CGAGTGCGTGCTGGGCCAGAGCAAGAGGGTGGACTTCTGCGGCAAGG | |
| | GCTACCACCTGATGAGCTTCCCCCAGAGCGCCCCCCACGGCGTGGTG | |
| | TTCCTGCACGTGACCTACGTGCCCGCCCAGGAGAAGAACTTCACCACC | |
| | GCCCCCGCCATCTGCCACGACGGCAAGGCCCACTTCCCCAGGGAGGG | |
| | CGTGTTCGTGAGCAACGGCACCCACTGGTTCGTGACCCAGAGGAACTT | |
| | CTACGAGCCCCAGATCATCACCACCGACAACACCTTCGTGAGCGGCAA | |
| | CTGCGACGTGGTGATCGGCATCGTGAACAACACCGTGTACGACCCCCT | |
| | GCAGCCCGAGCTGGACAGCTTCAAGGAGGAGCTGGACAAGTACTTCAA | |
| | GAACCACACCAGCCCCGACGTGGACCTGGGCGACATCAGCGGCATCA | |
| | ACGCCAGCGTGGTGAACATCCAGAAGGAGATCGACAGGCTGAACGAG | |
| | GTGGCCAAGAACCTGAACGAGAGCCTGATCGACCTGCAGGAGCTGGG | |
| | CAAGTACGAGCAGTACATCAAGTGGCCCTGGTACATCTGGCTGGGCTT | |
| | CATCGCCGGCCTGATCGCCATCGTGATGGTGACCATCATGCTGTGCTG | |
| | CATGACCAGCTGCTGCAGCTGCCTGAAGGGCTGCTGCAGCTGCGGCA | |
| | GCTGCTGCAAGTTCGACGAGGACGACAGCGAGCCCGTGCTGAAGGGC | |
| | GTGAAGCTGCACTACACCGGAAGCGGAGCCACGAACTTCTCTCTGTTA | |
| | AAGCAAGCAGGAGATGTTGAAGAAAACCCCGGGCCTATGGAGAGCCTG | |
| | GTGCCCGGCTTCAACGAGAAGACCCACGTGCAGCTGAGCCTGCCCGT | |
| | GCTGCAGGTGAGGGACGTGCTGGTGAGGGGCTTCGGCGACAGCGTGG | |
| | AGGAGGTGCTGAGCGAGGCCAGGCAGCACCTGAAGGACGGCACCTGC | |
| | GGCCTGGTGGAGGTGGAGAAGGGCGTGCTGCCCCAGCTGGAGCAGC | |
| | CCTACGTGTTCATCAAGAGGAGCGACGCCAGGACCGCCCCCCACGGC | |
| | CACGTGATGGTGGAGCTGGTGGCCGAGCTGGAGGGCATCCAGTACGG | |
| | CAGGAGCGGCGAGACCCTGGGCGTGCTGGTGCCCCACGTGGGCGAG | |
| | ATCCCCGTGGCCTACAGGAAGGTGCTGCTGAGGAAGAACGGCAACAA | |
| | GGGCGCCGGCGGCCACAGCTACGGCGCCGACCTGAAGAGCTTCGACC | |
| | TGGGCGACGAGCTGGGCACCGACCCCTACGAGGACTTCCAGGAGAAC | |
| | TGGAACACCAAGCACAGCAGCGGCGTGACCAGGGAGCTGATGAGGGA | |
| | GCTGAACGGCGGCGGAAGCGGAGAGGGCAGGGGAAGTCTTCTAACAT | |
| | GCGGGGACGTGGAGGAAAATCCCGGCCCCGCCTACACCAGGTACGTG | |
| | GACAACAACTTCTGCGGCCCCGACGGCTACCCCCTGGAGTGCATCAAG | |
| | GACCTGCTGGCCAGGGCCGGCAAGGCCAGCTGCACCCTGAGCGAGCA | |
| | GCTGGACTTCATCGACACCAAGAGGGGCGTGTACTGCTGCAGGGAGC | |
| | ACGAGCACGAGATCGCCTGGTACACCGAGAGGAGCGAGAAGAGCTAC | |
| | GAGCTGCAGACCCCCTTCGAGATCAAGCTGGCCAAGAAGTTCGACACC | |
| | TTCAACGGCGAGTGCCCCAACTTCGTGTTCCCCCTGAACAGCATCATCA | |
| | AGACCATCCAGCCCAGGGTGGAGAAGAAGAAGCTGGACGGCTTCATG | |
| | GGCAGGATCAGGAGCGTGTACCCCGTGGCCAGCCCCAACGAGTGCAA | |
| | CCAGATGTGCCTGAGCACCCTGATGAAGTGCGACCACTGCGGCGAGA | |
| | CCAGCTGGCAGACCGGCGACTTCGTGAAGGCCACCTGCGAGTTCTGC | |
| | GGCACCGAGAACCTGACCAAGGAGGGCGCCACCACCTGCGGCTACCT | |
| | GCCCCAGAACGCCGTGGTGAAGATCTACTGCCCCGCCTGCCACAACAG | |
| | CGAGGTGGGCCCCGAGCACAGCCTGGCCGAGTACCACAACGAGAGCG | |
| | GCCTGAAGACCATCCTGAGGAAGGGCGGCAGGACCATCGCCTTCGGC | |
| | GGCTGCGTGTTCAGCTACGTGGGCTGCCACAACAAGTGCGCCTACTGG | |
| | GTGCCCAGGGCCAGCGCCAACATCGGCTGCAACCACACCGGCGTGGT | |
| | GGGCGAGGGCAGCGAGGGCCTGAACGACAACCTGCTGGAGATCCTGC | |
| | AGAAGGAGAAGGTGAACATCAACATCGTGGGCGACTTCAAGCTGAACG | |
| | AGGAGATCGCCATCATCCTGGCCAGCTTCAGCGCCAGCACCAGCGCCT | |
| | TCGTGGAGACCGTGAAGGGCCTGGACTACAAGGCCTTCAAGCAGATCG | |
| | TGGAGAGCTGCGGCAACTTCAAGGTGACCAAGGGCAAGGCCAAGAAG | |
| | GGCGCCTGGAACATCGGCGAGCAGAAGAGCATCCTGAGCCCCCTGTA | |
| | CGCCTTCGCCAGCGAGGCCGCCAGGGTGGTGAGGAGCATCTTCAGCA | |
| | GGACCCTGGAGACCGCCCAGAACAGCGTGAGGGTGCTGCAGAAGGCC | |
| | GCCATCACCATCCTGGACGGCATCAGCCAGTACAGCCTGAGGCTGATC | |
| | GACGCCATGATGTTCACCAGCGACCTGGCCACCAACAACCTGGTGGTG | |
| | ATGGCCTACATCACCGGCGGCGTGGTGCAGCTGACCAGCCAGTGGCT | |
| | GACCAACATCTTCGGCACCGTGTACGAGAAGCTGAAGCCCGTGCTGGA | |
| | CTGGCTGGAGGAGAAGTTCAAGGAGGGCGTGGAGTTCCTGAGGGACG | |
| | GCTGGGAGATCGTGAAGTTCATCAGCACCTGCGCCTGCGAGATCGTGG | |
| | GCGGCCAGATCGTGACCTGCGCCAAGGAGATCAAGGAGAGCGTGCAG | |
| | ACCTTCTTCAAGCTGGTGAACAAGTTCCTGGCCCTGTGCGCCGACAGC | |
| | ATCATCATCGGCGGCGCCAAGCTGAAGGCCCTGAACCTGGGCGAGAC | |
| | CTTCGTGACCCACAGCAAGGGCCTGTACAGGAAGTGCGTGAAGAGCAG | |
| | GGAGGAGACCGGCCTGCTGATGCCCCTGAAGGCCCCCAAGGAGATCA | |
| | TCTTCCTGGAGGGCGAGACCCTGCCCACCGAGGTGCTGACCGAGGAG | |
| | GTGGTGCTGAAGACCGGCGACCTGCAGCCCCTGGAGCAGCCCACCAG | |
| | CGAGGCCGTGGAGGCCCCCCTGGTGGGCACCCCCGTGTGCATCAACG | |
| | GCCTGATGCTGCTGGAGATCAAGGACACCGAGAAGTACTGCGCCCTGG | |
| | CCCCCAACATGATGGTGACCAACAACACCTTCACCCTGAAGGGCGGCT | |
| | GATGA | |
| 23 | ATGTTCGTGTTCCTGGTGCTGCTGCCCCTGGTGAGCAGCCAGTGCGTG | 308 |
| Pan-CoV | AACCTGACCACCAGGACCCAGCTGCCCCCCGCCTACACCAACAGCTTC | |
| mRNA | ACCAGGGGCGTGTACTACCCCGACAAGGTGTTCAGGAGCAGCGTGCT | |
| HexaPro- | GCACAGCACCCAGGACCTGTTCCTGCCCTTCTTCAGCAACGTGACCTG | |
| NSP1-NSP2 | GTTCCACGCCATCCACGTGAGCGGCACCAACGGCACCAAGAGGTTCGA | |
| | CAACCCCGTGCTGCCCTTCAACGACGGCGTGTACTTCGCCAGCACCGA | |
| | GAAGAGCAACATCATCAGGGGCTGGATCTTCGGCACCACCCTGGACAG | |
| | CAAGACCCAGAGCCTGCTGATCGTGAACAACGCCACCAACGTGGTGAT | |
| | CAAGGTGTGCGAGTTCCAGTTCTGCAACGACCCCTTCCTGGGCGTGTA | |
| | CTACCACAAGAACAACAAGAGCTGGATGGAGAGCGAGTTCAGGGTGTA | |
| | CAGCAGCGCCAACAACTGCACCTTCGAGTACGTGAGCCAGCCCTTCCT | |
| | GATGGACCTGGAGGGCAAGCAGGGCAACTTCAAGAACCTGAGGGAGT | |
| | TCGTGTTCAAGAACATCGACGGCTACTTCAAGATCTACAGCAAGCACAC | |
| | CCCCATCAACCTGGTGAGGGACCTGCCCCAGGGCTTCAGCGCCCTGG | |
| | AGCCCCTGGTGGACCTGCCCATCGGCATCAACATCACCAGGTTCCAGA | |
| | CCCTGCTGGCCCTGCACAGGAGCTACCTGACCCCCGGCGACAGCAGC | |
| | AGCGGCTGGACCGCCGGCGCCGCCGCCTACTACGTGGGCTACCTGCA | |
| | GCCCAGGACCTTCCTGCTGAAGTACAACGAGAACGGCACCATCACCGA | |
| | CGCCGTGGACTGCGCCCTGGACCCCCTGAGCGAGACCAAGTGCACCC | |
| | TGAAGAGCTTCACCGTGGAGAAGGGCATCTACCAGACCAGCAACTTCA | |
| | GGGTGCAGCCCACCGAGAGCATCGTGAGGTTCCCCAACATCACCAACC | |
| | TGTGCCCCTTCGGCGAGGTGTTCAACGCCACCAGGTTCGCCAGCGTGT | |
| | ACGCCTGGAACAGGAAGAGGATCAGCAACTGCGTGGCCGACTACAGC | |
| | GTGCTGTACAACAGCGCCAGCTTCAGCACCTTCAAGTGCTACGGCGTG | |
| | AGCCCCACCAAGCTGAACGACCTGTGCTTCACCAACGTGTACGCCGAC | |
| | AGCTTCGTGATCAGGGGCGACGAGGTGAGGCAGATCGCCCCCGGCCA | |
| | GACCGGCAAGATCGCCGACTACAACTACAAGCTGCCCGACGACTTCAC | |
| | CGGCTGCGTGATCGCCTGGAACAGCAACAACCTGGACAGCAAGGTGG | |
| | GCGGCAACTACAACTACCTGTACAGGCTGTTCAGGAAGAGCAACCTGA | |
| | AGCCCTTCGAGAGGGACATCAGCACCGAGATCTACCAGGCCGGCAGC | |
| | ACCCCCTGCAACGGCGTGGAGGGCTTCAACTGCTACTTCCCCCTGCAG | |
| | AGCTACGGCTTCCAGCCCACCAACGGCGTGGGCTACCAGCCCTACAG | |
| | GGTGGTGGTGCTGAGCTTCGAGCTGCTGCACGCCCCCGCCACCGTGT | |
| | GCGGCCCCAAGAAGAGCACCAACCTGGTGAAGAACAAGTGCGTGAACT | |
| | TCAACTTCAACGGCCTGACCGGCACCGGCGTGCTGACCGAGAGCAACA | |
| | AGAAGTTCCTGCCCTTCCAGCAGTTCGGCAGGGACATCGCCGACACCA | |
| | CCGACGCCGTGAGGGACCCCCAGACCCTGGAGATCCTGGACATCACC | |
| | CCCTGCAGCTTCGGCGGCGTGAGCGTGATCACCCCCGGCACCAACAC | |
| | CAGCAACCAGGTGGCCGTGCTGTACCAGGACGTGAACTGCACCGAGG | |
| | TGCCCGTGGCCATCCACGCCGACCAGCTGACCCCCACCTGGAGGGTG | |
| | TACAGCACCGGCAGCAACGTGTTCCAGACCAGGGCCGGCTGCCTGAT | |
| | CGGCGCCGAGCACGTGAACAACAGCTACGAGTGCGACATCCCCATCG | |
| | GCGCCGGCATCTGCGCCAGCTACCAGACCCAGACCAACAGCCCCGGC | |
| | AGCGCCAGCAGCGTGGCCAGCCAGAGCATCATCGCCTACACCATGAG | |
| | CCTGGGCGCCGAGAACAGCGTGGCCTACAGCAACAACAGCATCGCCA | |
| | TCCCCACCAACTTCACCATCAGCGTGACCACCGAGATCCTGCCCGTGA | |
| | GCATGACCAAGACCAGCGTGGACTGCACCATGTACATCTGCGGCGACA | |
| | GCACCGAGTGCAGCAACCTGCTGCTGCAGTACGGCAGCTTCTGCACCC | |
| | AGCTGAACAGGGCCCTGACCGGCATCGCCGTGGAGCAGGACAAGAAC | |
| | ACCCAGGAGGTGTTCGCCCAGGTGAAGCAGATCTACAAGACCCCCCCC | |
| | ATCAAGGACTTCGGCGGCTTCAACTTCAGCCAGATCCTGCCCGACCCC | |
| | AGCAAGCCCAGCAAGAGGAGCCCCATCGAGGACCTGCTGTTCAACAAG | |
| | GTGACCCTGGCCGACGCCGGCTTCATCAAGCAGTACGGCGACTGCCT | |
| | GGGCGACATCGCCGCCAGGGACCTGATCTGCGCCCAGAAGTTCAACG | |
| | GCCTGACCGTGCTGCCCCCCCTGCTGACCGACGAGATGATCGCCCAG | |
| | TACACCAGCGCCCTGCTGGCCGGCACCATCACCAGCGGCTGGACCTT | |
| | CGGCGCCGGCCCCGCCCTGCAGATCCCCTTCCCCATGCAGATGGCCT | |
| | ACAGGTTCAACGGCATCGGCGTGACCCAGAACGTGCTGTACGAGAACC | |
| | AGAAGCTGATCGCCAACCAGTTCAACAGCGCCATCGGCAAGATCCAGG | |
| | ACAGCCTGAGCAGCACCCCCAGCGCCCTGGGCAAGCTGCAGGACGTG | |
| | GTGAACCAGAACGCCCAGGCCCTGAACACCCTGGTGAAGCAGCTGAG | |
| | CAGCAACTTCGGCGCCATCAGCAGCGTGCTGAACGACATCCTGAGCAG | |
| | GCTGGACCCCCCCGAGGCCGAGGTGCAGATCGACAGGCTGATCACCG | |
| | GCAGGCTGCAGAGCCTGCAGACCTACGTGACCCAGCAGCTGATCAGG | |
| | GCCGCCGAGATCAGGGCCAGCGCCAACCTGGCCGCCACCAAGATGAG | |
| | CGAGTGCGTGCTGGGCCAGAGCAAGAGGGTGGACTTCTGCGGCAAGG | |
| | GCTACCACCTGATGAGCTTCCCCCAGAGCGCCCCCCACGGCGTGGTG | |
| | TTCCTGCACGTGACCTACGTGCCCGCCCAGGAGAAGAACTTCACCACC | |
| | GCCCCCGCCATCTGCCACGACGGCAAGGCCCACTTCCCCAGGGAGGG | |
| | CGTGTTCGTGAGCAACGGCACCCACTGGTTCGTGACCCAGAGGAACTT | |
| | CTACGAGCCCCAGATCATCACCACCGACAACACCTTCGTGAGCGGCAA | |
| | CTGCGACGTGGTGATCGGCATCGTGAACAACACCGTGTACGACCCCCT | |
| | GCAGCCCGAGCTGGACAGCTTCAAGGAGGAGCTGGACAAGTACTTCAA | |
| | GAACCACACCAGCCCCGACGTGGACCTGGGCGACATCAGCGGCATCA | |
| | ACGCCAGCGTGGTGAACATCCAGAAGGAGATCGACAGGCTGAACGAG | |
| | GTGGCCAAGAACCTGAACGAGAGCCTGATCGACCTGCAGGAGCTGGG | |
| | CAAGTACGAGCAGTACATCAAGTGGCCCTGGTACATCTGGCTGGGCTT | |
| | CATCGCCGGCCTGATCGCCATCGTGATGGTGACCATCATGCTGTGCTG | |
| | CATGACCAGCTGCTGCAGCTGCCTGAAGGGCTGCTGCAGCTGCGGCA | |
| | GCTGCTGCAAGTTCGACGAGGACGACAGCGAGCCCGTGCTGAAGGGC | |
| | GTGAAGCTGCACTACACCGGAAGCGGAGCCACGAACTTCTCTCTGTTA | |
| | AAGCAAGCAGGAGATGTTGAAGAAAACCCCGGGCCTATGGAGAGCCTG | |
| | GTGCCCGGCTTCAACGAGAAGACCCACGTGCAGCTGAGCCTGCCCGT | |
| | GCTGCAGGTGAGGGACGTGCTGGTGAGGGGCTTCGGCGACAGCGTGG | |
| | AGGAGGTGCTGAGCGAGGCCAGGCAGCACCTGAAGGACGGCACCTGC | |
| | GGCCTGGTGGAGGTGGAGAAGGGCGTGCTGCCCCAGCTGGAGCAGC | |
| | CCTACGTGTTCATCAAGAGGAGCGACGCCAGGACCGCCCCCCACGGC | |
| | CACGTGATGGTGGAGCTGGTGGCCGAGCTGGAGGGCATCCAGTACGG | |
| | CAGGAGCGGCGAGACCCTGGGCGTGCTGGTGCCCCACGTGGGCGAG | |
| | ATCCCCGTGGCCTACAGGAAGGTGCTGCTGAGGAAGAACGGCAACAA | |
| | GGGCGCCGGCGGCCACAGCTACGGCGCCGACCTGAAGAGCTTCGACC | |
| | TGGGCGACGAGCTGGGCACCGACCCCTACGAGGACTTCCAGGAGAAC | |
| | TGGAACACCAAGCACAGCAGCGGCGTGACCAGGGAGCTGATGAGGGA | |
| | GCTGAACGGCGGCGGAAGCGGAGAGGGCAGGGGAAGTCTTCTAACAT | |
| | GCGGGGACGTGGAGGAAAATCCCGGCCCCGCCTACACCAGGTACGTG | |
| | GACAACAACTTCTGCGGCCCCGACGGCTACCCCCTGGAGTGCATCAAG | |
| | GACCTGCTGGCCAGGGCCGGCAAGGCCAGCTGCACCCTGAGCGAGCA | |
| | GCTGGACTTCATCGACACCAAGAGGGGCGTGTACTGCTGCAGGGAGC | |
| | ACGAGCACGAGATCGCCTGGTACACCGAGAGGAGCGAGAAGAGCTAC | |
| | GAGCTGCAGACCCCCTTCGAGATCAAGCTGGCCAAGAAGTTCGACACC | |
| | TTCAACGGCGAGTGCCCCAACTTCGTGTTCCCCCTGAACAGCATCATCA | |
| | AGACCATCCAGCCCAGGGTGGAGAAGAAGAAGCTGGACGGCTTCATG | |
| | GGCAGGATCAGGAGCGTGTACCCCGTGGCCAGCCCCAACGAGTGCAA | |
| | CCAGATGTGCCTGAGCACCCTGATGAAGTGCGACCACTGCGGCGAGA | |
| | CCAGCTGGCAGACCGGCGACTTCGTGAAGGCCACCTGCGAGTTCTGC | |
| | GGCACCGAGAACCTGACCAAGGAGGGCGCCACCACCTGCGGCTACCT | |
| | GCCCCAGAACGCCGTGGTGAAGATCTACTGCCCCGCCTGCCACAACAG | |
| | CGAGGTGGGCCCCGAGCACAGCCTGGCCGAGTACCACAACGAGAGCG | |
| | GCCTGAAGACCATCCTGAGGAAGGGCGGCAGGACCATCGCCTTCGGC | |
| | GGCTGCGTGTTCAGCTACGTGGGCTGCCACAACAAGTGCGCCTACTGG | |
| | GTGCCCAGGGCCAGCGCCAACATCGGCTGCAACCACACCGGCGTGGT | |
| | GGGCGAGGGCAGCGAGGGCCTGAACGACAACCTGCTGGAGATCCTGC | |
| | AGAAGGAGAAGGTGAACATCAACATCGTGGGCGACTTCAAGCTGAACG | |
| | AGGAGATCGCCATCATCCTGGCCAGCTTCAGCGCCAGCACCAGCGCCT | |
| | TCGTGGAGACCGTGAAGGGCCTGGACTACAAGGCCTTCAAGCAGATCG | |
| | TGGAGAGCTGCGGCAACTTCAAGGTGACCAAGGGCAAGGCCAAGAAG | |
| | GGCGCCTGGAACATCGGCGAGCAGAAGAGCATCCTGAGCCCCCTGTA | |
| | CGCCTTCGCCAGCGAGGCCGCCAGGGTGGTGAGGAGCATCTTCAGCA | |
| | GGACCCTGGAGACCGCCCAGAACAGCGTGAGGGTGCTGCAGAAGGCC | |
| | GCCATCACCATCCTGGACGGCATCAGCCAGTACAGCCTGAGGCTGATC | |
| | GACGCCATGATGTTCACCAGCGACCTGGCCACCAACAACCTGGTGGTG | |
| | ATGGCCTACATCACCGGCGGCGTGGTGCAGCTGACCAGCCAGTGGCT | |
| | GACCAACATCTTCGGCACCGTGTACGAGAAGCTGAAGCCCGTGCTGGA | |
| | CTGGCTGGAGGAGAAGTTCAAGGAGGGCGTGGAGTTCCTGAGGGACG | |
| | GCTGGGAGATCGTGAAGTTCATCAGCACCTGCGCCTGCGAGATCGTGG | |
| | GCGGCCAGATCGTGACCTGCGCCAAGGAGATCAAGGAGAGCGTGCAG | |
| | ACCTTCTTCAAGCTGGTGAACAAGTTCCTGGCCCTGTGCGCCGACAGC | |
| | ATCATCATCGGCGGCGCCAAGCTGAAGGCCCTGAACCTGGGCGAGAC | |
| | CTTCGTGACCCACAGCAAGGGCCTGTACAGGAAGTGCGTGAAGAGCAG | |
| | GGAGGAGACCGGCCTGCTGATGCCCCTGAAGGCCCCCAAGGAGATCA | |
| | TCTTCCTGGAGGGCGAGACCCTGCCCACCGAGGTGCTGACCGAGGAG | |
| | GTGGTGCTGAAGACCGGCGACCTGCAGCCCCTGGAGCAGCCCACCAG | |
| | CGAGGCCGTGGAGGCCCCCCTGGTGGGCACCCCCGTGTGCATCAACG | |
| | GCCTGATGCTGCTGGAGATCAAGGACACCGAGAAGTACTGCGCCCTGG | |
| | CCCCCAACATGATGGTGACCAACAACACCTTCACCCTGAAGGGCGGCT | |
| | GATGA | |
| 24 | ATGTTCGTGTTCCTGGTGCTGCTGCCCCTGGTGAGCAGCCAGTGCGTG | 309 |
| Pan-CoV | AACCTGACCACCAGGACCCAGCTGCCCCCCGCCTACACCAACAGCTTC | |
| mRNA Spike- | ACCAGGGGCGTGTACTACCCCGACAAGGTGTTCAGGAGCAGCGTGCT | |
| NSP6-NSP7- | GCACAGCACCCAGGACCTGTTCCTGCCCTTCTTCAGCAACGTGACCTG | |
| NSP8 | GTTCCACGCCATCCACGTGAGCGGCACCAACGGCACCAAGAGGTTCGA | |
| | CAACCCCGTGCTGCCCTTCAACGACGGCGTGTACTTCGCCAGCACCGA | |
| | GAAGAGCAACATCATCAGGGGCTGGATCTTCGGCACCACCCTGGACAG | |
| | CAAGACCCAGAGCCTGCTGATCGTGAACAACGCCACCAACGTGGTGAT | |
| | CAAGGTGTGCGAGTTCCAGTTCTGCAACGACCCCTTCCTGGGCGTGTA | |
| | CTACCACAAGAACAACAAGAGCTGGATGGAGAGCGAGTTCAGGGTGTA | |
| | CAGCAGCGCCAACAACTGCACCTTCGAGTACGTGAGCCAGCCCTTCCT | |
| | GATGGACCTGGAGGGCAAGCAGGGCAACTTCAAGAACCTGAGGGAGT | |
| | TCGTGTTCAAGAACATCGACGGCTACTTCAAGATCTACAGCAAGCACAC | |
| | CCCCATCAACCTGGTGAGGGACCTGCCCCAGGGCTTCAGCGCCCTGG | |
| | AGCCCCTGGTGGACCTGCCCATCGGCATCAACATCACCAGGTTCCAGA | |
| | CCCTGCTGGCCCTGCACAGGAGCTACCTGACCCCCGGCGACAGCAGC | |
| | AGCGGCTGGACCGCCGGCGCCGCCGCCTACTACGTGGGCTACCTGCA | |
| | GCCCAGGACCTTCCTGCTGAAGTACAACGAGAACGGCACCATCACCGA | |
| | CGCCGTGGACTGCGCCCTGGACCCCCTGAGCGAGACCAAGTGCACCC | |
| | TGAAGAGCTTCACCGTGGAGAAGGGCATCTACCAGACCAGCAACTTCA | |
| | GGGTGCAGCCCACCGAGAGCATCGTGAGGTTCCCCAACATCACCAACC | |
| | TGTGCCCCTTCGGCGAGGTGTTCAACGCCACCAGGTTCGCCAGCGTGT | |
| | ACGCCTGGAACAGGAAGAGGATCAGCAACTGCGTGGCCGACTACAGC | |
| | GTGCTGTACAACAGCGCCAGCTTCAGCACCTTCAAGTGCTACGGCGTG | |
| | AGCCCCACCAAGCTGAACGACCTGTGCTTCACCAACGTGTACGCCGAC | |
| | AGCTTCGTGATCAGGGGCGACGAGGTGAGGCAGATCGCCCCCGGCCA | |
| | GACCGGCAAGATCGCCGACTACAACTACAAGCTGCCCGACGACTTCAC | |
| | CGGCTGCGTGATCGCCTGGAACAGCAACAACCTGGACAGCAAGGTGG | |
| | GCGGCAACTACAACTACCTGTACAGGCTGTTCAGGAAGAGCAACCTGA | |
| | AGCCCTTCGAGAGGGACATCAGCACCGAGATCTACCAGGCCGGCAGC | |
| | ACCCCCTGCAACGGCGTGGAGGGCTTCAACTGCTACTTCCCCCTGCAG | |
| | AGCTACGGCTTCCAGCCCACCAACGGCGTGGGCTACCAGCCCTACAG | |
| | GGTGGTGGTGCTGAGCTTCGAGCTGCTGCACGCCCCCGCCACCGTGT | |
| | GCGGCCCCAAGAAGAGCACCAACCTGGTGAAGAACAAGTGCGTGAACT | |
| | TCAACTTCAACGGCCTGACCGGCACCGGCGTGCTGACCGAGAGCAACA | |
| | AGAAGTTCCTGCCCTTCCAGCAGTTCGGCAGGGACATCGCCGACACCA | |
| | CCGACGCCGTGAGGGACCCCCAGACCCTGGAGATCCTGGACATCACC | |
| | CCCTGCAGCTTCGGCGGCGTGAGCGTGATCACCCCCGGCACCAACAC | |
| | CAGCAACCAGGTGGCCGTGCTGTACCAGGACGTGAACTGCACCGAGG | |
| | TGCCCGTGGCCATCCACGCCGACCAGCTGACCCCCACCTGGAGGGTG | |
| | TACAGCACCGGCAGCAACGTGTTCCAGACCAGGGCCGGCTGCCTGAT | |
| | CGGCGCCGAGCACGTGAACAACAGCTACGAGTGCGACATCCCCATCG | |
| | GCGCCGGCATCTGCGCCAGCTACCAGACCCAGACCAACAGCCCCAGG | |
| | AGGGCCAGGAGCGTGGCCAGCCAGAGCATCATCGCCTACACCATGAG | |
| | CCTGGGCGCCGAGAACAGCGTGGCCTACAGCAACAACAGCATCGCCA | |
| | TCCCCACCAACTTCACCATCAGCGTGACCACCGAGATCCTGCCCGTGA | |
| | GCATGACCAAGACCAGCGTGGACTGCACCATGTACATCTGCGGCGACA | |
| | GCACCGAGTGCAGCAACCTGCTGCTGCAGTACGGCAGCTTCTGCACCC | |
| | AGCTGAACAGGGCCCTGACCGGCATCGCCGTGGAGCAGGACAAGAAC | |
| | ACCCAGGAGGTGTTCGCCCAGGTGAAGCAGATCTACAAGACCCCCCCC | |
| | ATCAAGGACTTCGGCGGCTTCAACTTCAGCCAGATCCTGCCCGACCCC | |
| | AGCAAGCCCAGCAAGAGGAGCTTCATCGAGGACCTGCTGTTCAACAAG | |
| | GTGACCCTGGCCGACGCCGGCTTCATCAAGCAGTACGGCGACTGCCT | |
| | GGGCGACATCGCCGCCAGGGACCTGATCTGCGCCCAGAAGTTCAACG | |
| | GCCTGACCGTGCTGCCCCCCCTGCTGACCGACGAGATGATCGCCCAG | |
| | TACACCAGCGCCCTGCTGGCCGGCACCATCACCAGCGGCTGGACCTT | |
| | CGGCGCCGGCGCCGCCCTGCAGATCCCCTTCGCCATGCAGATGGCCT | |
| | ACAGGTTCAACGGCATCGGCGTGACCCAGAACGTGCTGTACGAGAACC | |
| | AGAAGCTGATCGCCAACCAGTTCAACAGCGCCATCGGCAAGATCCAGG | |
| | ACAGCCTGAGCAGCACCGCCAGCGCCCTGGGCAAGCTGCAGGACGTG | |
| | GTGAACCAGAACGCCCAGGCCCTGAACACCCTGGTGAAGCAGCTGAG | |
| | CAGCAACTTCGGCGCCATCAGCAGCGTGCTGAACGACATCCTGAGCAG | |
| | GCTGGACCCCCCCGAGGCCGAGGTGCAGATCGACAGGCTGATCACCG | |
| | GCAGGCTGCAGAGCCTGCAGACCTACGTGACCCAGCAGCTGATCAGG | |
| | GCCGCCGAGATCAGGGCCAGCGCCAACCTGGCCGCCACCAAGATGAG | |
| | CGAGTGCGTGCTGGGCCAGAGCAAGAGGGTGGACTTCTGCGGCAAGG | |
| | GCTACCACCTGATGAGCTTCCCCCAGAGCGCCCCCCACGGCGTGGTG | |
| | TTCCTGCACGTGACCTACGTGCCCGCCCAGGAGAAGAACTTCACCACC | |
| | GCCCCCGCCATCTGCCACGACGGCAAGGCCCACTTCCCCAGGGAGGG | |
| | CGTGTTCGTGAGCAACGGCACCCACTGGTTCGTGACCCAGAGGAACTT | |
| | CTACGAGCCCCAGATCATCACCACCGACAACACCTTCGTGAGCGGCAA | |
| | CTGCGACGTGGTGATCGGCATCGTGAACAACACCGTGTACGACCCCCT | |
| | GCAGCCCGAGCTGGACAGCTTCAAGGAGGAGCTGGACAAGTACTTCAA | |
| | GAACCACACCAGCCCCGACGTGGACCTGGGCGACATCAGCGGCATCA | |
| | ACGCCAGCGTGGTGAACATCCAGAAGGAGATCGACAGGCTGAACGAG | |
| | GTGGCCAAGAACCTGAACGAGAGCCTGATCGACCTGCAGGAGCTGGG | |
| | CAAGTACGAGCAGTACATCAAGTGGCCCTGGTACATCTGGCTGGGCTT | |
| | CATCGCCGGCCTGATCGCCATCGTGATGGTGACCATCATGCTGTGCTG | |
| | CATGACCAGCTGCTGCAGCTGCCTGAAGGGCTGCTGCAGCTGCGGCA | |
| | GCTGCTGCAAGTTCGACGAGGACGACAGCGAGCCCGTGCTGAAGGGC | |
| | GTGAAGCTGCACTACACCGGAAGCGGAGCCACGAACTTCTCTCTGTTA | |
| | AAGCAAGCAGGAGATGTTGAAGAAAACCCCGGGCCTAGCGCCGTGAA | |
| | GAGGACCATCAAGGGCACCCACCACTGGCTGCTGCTGACCATCCTGAC | |
| | CAGCCTGCTGGTGCTGGTGCAGAGCACCCAGTGGAGCCTGTTCTTCTT | |
| | CCTGTACGAGAACGCCTTCCTGCCCTTCGCCATGGGCATCATCGCCAT | |
| | GAGCGCCTTCGCCATGATGTTCGTGAAGCACAAGCACGCCTTCCTGTG | |
| | CCTGTTCCTGCTGCCCAGCCTGGCCACCGTGGCCTACTTCAACATGGT | |
| | GTACATGCCCGCCAGCTGGGTGATGAGGATCATGACCTGGCTGGACAT | |
| | GGTGGACACCAGCCTGAGCGGCTTCAAGCTGAAGGACTGCGTGATGTA | |
| | CGCCAGCGCCGTGGTGCTGCTGATCCTGATGACCGCCAGGACCGTGT | |
| | ACGACGACGGCGCCAGGAGGGTGTGGACCCTGATGAACGTGCTGACC | |
| | CTGGTGTACAAGGTGTACTACGGCAACGCCCTGGACCAGGCCATCAGC | |
| | ATGTGGGCCCTGATCATCAGCGTGACCAGCAACTACAGCGGCGTGGTG | |
| | ACCACCGTGATGTTCCTGGCCAGGGGCATCGTGTTCATGTGCGTGGAG | |
| | TACTGCCCCATCTTCTTCATCACCGGCAACACCCTGCAGTGCATCATGC | |
| | TGGTGTACTGCTTCCTGGGCTACTTCTGCACCTGCTACTTCGGCCTGTT | |
| | CTGCCTGCTGAACAGGTACTTCAGGCTGACCCTGGGCGTGTACGACTA | |
| | CCTGGTGAGCACCCAGGAGTTCAGGTACATGAACAGCCAGGGCCTGCT | |
| | GCCCCCCAAGAACAGCATCGACGCCTTCAAGCTGAACATCAAGCTGCT | |
| | GGGCGTGGGCGGCAAGCCCTGCATCAAGGTGGCCACCGTGCAGGGAA | |
| | GCGGAGAGGGCAGGGGAAGTCTTCTAACATGCGGGGACGTGGAGGAA | |
| | AATCCCGGCCCCAGCAAGATGAGCGACGTGAAGTGCACCAGCGTGGT | |
| | GCTGCTGAGCGTGCTGCAGCAGCTGAGGGTGGAGAGCAGCAGCAAGC | |
| | TGTGGGCCCAGTGCGTGCAGCTGCACAACGACATCCTGCTGGCCAAG | |
| | GACACCACCGAGGCCTTCGAGAAGATGGTGAGCCTGCTGAGCGTGCT | |
| | GCTGAGCATGCAGGGCGCCGTGGACATCAACAAGCTGTGCGAGGAGA | |
| | TGCTGGACAACAGGGCCACCCTGCAGGGAAGCGGACAGTGTACTAATT | |
| | ATGCTCTCTTGAAATTGGCTGGAGATGTTGAGAGCAACCCAGGTCCCG | |
| | CCATCGCCAGCGAGTTCAGCAGCCTGCCCAGCTACGCCGCCTTCGCCA | |
| | CCGCCCAGGAGGCCTACGAGCAGGCCGTGGCCAACGGCGACAGCGA | |
| | GGTGGTGCTGAAGAAGCTGAAGAAGAGCCTGAACGTGGCCAAGAGCG | |
| | AGTTCGACAGGGACGCCGCCATGCAGAGGAAGCTGGAGAAGATGGCC | |
| | GACCAGGCCATGACCCAGATGTACAAGCAGGCCAGGAGCGAGGACAA | |
| | GAGGGCCAAGGTGACCAGCGCCATGCAGACCATGCTGTTCACCATGCT | |
| | GAGGAAGCTGGACAACGACGCCCTGAACAACATCATCAACAACGCCAG | |
| | GGACGGCTGCGTGCCCCTGAACATCATCCCCCTGACCACCGCCGCCA | |
| | AGCTGATGGTGGTGATCCCCGACTACAACACCTACAAGAACACCTGCG | |
| | ACGGCACCACCTTCACCTACGCCAGCGCCCTGTGGGAGATCCAGCAG | |
| | GTGGTGGACGCCGACAGCAAGATCGTGCAGCTGAGCGAGATCAGCAT | |
| | GGACAACAGCCCCAACCTGGCCTGGCCCCTGATCGTGACCGCCCTGA | |
| | GGGCCAACAGCGCCGTGAAGCTGCAGTGATGA | |
| 25 | ATGTTCGTGTTCCTGGTGCTGCTGCCCCTGGTGAGCAGCCAGTGCGTG | 310 |
| Pan-CoV | AACCTGACCACCAGGACCCAGCTGCCCCCCGCCTACACCAACAGCTTC | |
| mRNA | ACCAGGGGCGTGTACTACCCCGACAAGGTGTTCAGGAGCAGCGTGCT | |
| HexaPro- | GCACAGCACCCAGGACCTGTTCCTGCCCTTCTTCAGCAACGTGACCTG | |
| NSP6-NSP7- | GTTCCACGCCATCCACGTGAGCGGCACCAACGGCACCAAGAGGTTCGA | |
| NSP8 | CAACCCCGTGCTGCCCTTCAACGACGGCGTGTACTTCGCCAGCACCGA | |
| | GAAGAGCAACATCATCAGGGGCTGGATCTTCGGCACCACCCTGGACAG | |
| | CAAGACCCAGAGCCTGCTGATCGTGAACAACGCCACCAACGTGGTGAT | |
| | CAAGGTGTGCGAGTTCCAGTTCTGCAACGACCCCTTCCTGGGCGTGTA | |
| | CTACCACAAGAACAACAAGAGCTGGATGGAGAGCGAGTTCAGGGTGTA | |
| | CAGCAGCGCCAACAACTGCACCTTCGAGTACGTGAGCCAGCCCTTCCT | |
| | GATGGACCTGGAGGGCAAGCAGGGCAACTTCAAGAACCTGAGGGAGT | |
| | TCGTGTTCAAGAACATCGACGGCTACTTCAAGATCTACAGCAAGCACAC | |
| | CCCCATCAACCTGGTGAGGGACCTGCCCCAGGGCTTCAGCGCCCTGG | |
| | AGCCCCTGGTGGACCTGCCCATCGGCATCAACATCACCAGGTTCCAGA | |
| | CCCTGCTGGCCCTGCACAGGAGCTACCTGACCCCCGGCGACAGCAGC | |
| | AGCGGCTGGACCGCCGGCGCCGCCGCCTACTACGTGGGCTACCTGCA | |
| | GCCCAGGACCTTCCTGCTGAAGTACAACGAGAACGGCACCATCACCGA | |
| | CGCCGTGGACTGCGCCCTGGACCCCCTGAGCGAGACCAAGTGCACCC | |
| | TGAAGAGCTTCACCGTGGAGAAGGGCATCTACCAGACCAGCAACTTCA | |
| | GGGTGCAGCCCACCGAGAGCATCGTGAGGTTCCCCAACATCACCAACC | |
| | TGTGCCCCTTCGGCGAGGTGTTCAACGCCACCAGGTTCGCCAGCGTGT | |
| | ACGCCTGGAACAGGAAGAGGATCAGCAACTGCGTGGCCGACTACAGC | |
| | GTGCTGTACAACAGCGCCAGCTTCAGCACCTTCAAGTGCTACGGCGTG | |
| | AGCCCCACCAAGCTGAACGACCTGTGCTTCACCAACGTGTACGCCGAC | |
| | AGCTTCGTGATCAGGGGCGACGAGGTGAGGCAGATCGCCCCCGGCCA | |
| | GACCGGCAAGATCGCCGACTACAACTACAAGCTGCCCGACGACTTCAC | |
| | CGGCTGCGTGATCGCCTGGAACAGCAACAACCTGGACAGCAAGGTGG | |
| | GCGGCAACTACAACTACCTGTACAGGCTGTTCAGGAAGAGCAACCTGA | |
| | AGCCCTTCGAGAGGGACATCAGCACCGAGATCTACCAGGCCGGCAGC | |
| | ACCCCCTGCAACGGCGTGGAGGGCTTCAACTGCTACTTCCCCCTGCAG | |
| | AGCTACGGCTTCCAGCCCACCAACGGCGTGGGCTACCAGCCCTACAG | |
| | GGTGGTGGTGCTGAGCTTCGAGCTGCTGCACGCCCCCGCCACCGTGT | |
| | GCGGCCCCAAGAAGAGCACCAACCTGGTGAAGAACAAGTGCGTGAACT | |
| | TCAACTTCAACGGCCTGACCGGCACCGGCGTGCTGACCGAGAGCAACA | |
| | AGAAGTTCCTGCCCTTCCAGCAGTTCGGCAGGGACATCGCCGACACCA | |
| | CCGACGCCGTGAGGGACCCCCAGACCCTGGAGATCCTGGACATCACC | |
| | CCCTGCAGCTTCGGCGGCGTGAGCGTGATCACCCCCGGCACCAACAC | |
| | CAGCAACCAGGTGGCCGTGCTGTACCAGGACGTGAACTGCACCGAGG | |
| | TGCCCGTGGCCATCCACGCCGACCAGCTGACCCCCACCTGGAGGGTG | |
| | TACAGCACCGGCAGCAACGTGTTCCAGACCAGGGCCGGCTGCCTGAT | |
| | CGGCGCCGAGCACGTGAACAACAGCTACGAGTGCGACATCCCCATCG | |
| | GCGCCGGCATCTGCGCCAGCTACCAGACCCAGACCAACAGCCCCGGC | |
| | AGCGCCAGCAGCGTGGCCAGCCAGAGCATCATCGCCTACACCATGAG | |
| | CCTGGGCGCCGAGAACAGCGTGGCCTACAGCAACAACAGCATCGCCA | |
| | TCCCCACCAACTTCACCATCAGCGTGACCACCGAGATCCTGCCCGTGA | |
| | GCATGACCAAGACCAGCGTGGACTGCACCATGTACATCTGCGGCGACA | |
| | GCACCGAGTGCAGCAACCTGCTGCTGCAGTACGGCAGCTTCTGCACCC | |
| | AGCTGAACAGGGCCCTGACCGGCATCGCCGTGGAGCAGGACAAGAAC | |
| | ACCCAGGAGGTGTTCGCCCAGGTGAAGCAGATCTACAAGACCCCCCCC | |
| | ATCAAGGACTTCGGCGGCTTCAACTTCAGCCAGATCCTGCCCGACCCC | |
| | AGCAAGCCCAGCAAGAGGAGCCCCATCGAGGACCTGCTGTTCAACAAG | |
| | GTGACCCTGGCCGACGCCGGCTTCATCAAGCAGTACGGCGACTGCCT | |
| | GGGCGACATCGCCGCCAGGGACCTGATCTGCGCCCAGAAGTTCAACG | |
| | GCCTGACCGTGCTGCCCCCCCTGCTGACCGACGAGATGATCGCCCAG | |
| | TACACCAGCGCCCTGCTGGCCGGCACCATCACCAGCGGCTGGACCTT | |
| | CGGCGCCGGCCCCGCCCTGCAGATCCCCTTCCCCATGCAGATGGCCT | |
| | ACAGGTTCAACGGCATCGGCGTGACCCAGAACGTGCTGTACGAGAACC | |
| | AGAAGCTGATCGCCAACCAGTTCAACAGCGCCATCGGCAAGATCCAGG | |
| | ACAGCCTGAGCAGCACCCCCAGCGCCCTGGGCAAGCTGCAGGACGTG | |
| | GTGAACCAGAACGCCCAGGCCCTGAACACCCTGGTGAAGCAGCTGAG | |
| | CAGCAACTTCGGCGCCATCAGCAGCGTGCTGAACGACATCCTGAGCAG | |
| | GCTGGACCCCCCCGAGGCCGAGGTGCAGATCGACAGGCTGATCACCG | |
| | GCAGGCTGCAGAGCCTGCAGACCTACGTGACCCAGCAGCTGATCAGG | |
| | GCCGCCGAGATCAGGGCCAGCGCCAACCTGGCCGCCACCAAGATGAG | |
| | CGAGTGCGTGCTGGGCCAGAGCAAGAGGGTGGACTTCTGCGGCAAGG | |
| | GCTACCACCTGATGAGCTTCCCCCAGAGCGCCCCCCACGGCGTGGTG | |
| | TTCCTGCACGTGACCTACGTGCCCGCCCAGGAGAAGAACTTCACCACC | |
| | GCCCCCGCCATCTGCCACGACGGCAAGGCCCACTTCCCCAGGGAGGG | |
| | CGTGTTCGTGAGCAACGGCACCCACTGGTTCGTGACCCAGAGGAACTT | |
| | CTACGAGCCCCAGATCATCACCACCGACAACACCTTCGTGAGCGGCAA | |
| | CTGCGACGTGGTGATCGGCATCGTGAACAACACCGTGTACGACCCCCT | |
| | GCAGCCCGAGCTGGACAGCTTCAAGGAGGAGCTGGACAAGTACTTCAA | |
| | GAACCACACCAGCCCCGACGTGGACCTGGGCGACATCAGCGGCATCA | |
| | ACGCCAGCGTGGTGAACATCCAGAAGGAGATCGACAGGCTGAACGAG | |
| | GTGGCCAAGAACCTGAACGAGAGCCTGATCGACCTGCAGGAGCTGGG | |
| | CAAGTACGAGCAGTACATCAAGTGGCCCTGGTACATCTGGCTGGGCTT | |
| | CATCGCCGGCCTGATCGCCATCGTGATGGTGACCATCATGCTGTGCTG | |
| | CATGACCAGCTGCTGCAGCTGCCTGAAGGGCTGCTGCAGCTGCGGCA | |
| | GCTGCTGCAAGTTCGACGAGGACGACAGCGAGCCCGTGCTGAAGGGC | |
| | GTGAAGCTGCACTACACCGGAAGCGGAGCCACGAACTTCTCTCTGTTA | |
| | AAGCAAGCAGGAGATGTTGAAGAAAACCCCGGGCCTAGCGCCGTGAA | |
| | GAGGACCATCAAGGGCACCCACCACTGGCTGCTGCTGACCATCCTGAC | |
| | CAGCCTGCTGGTGCTGGTGCAGAGCACCCAGTGGAGCCTGTTCTTCTT | |
| | CCTGTACGAGAACGCCTTCCTGCCCTTCGCCATGGGCATCATCGCCAT | |
| | GAGCGCCTTCGCCATGATGTTCGTGAAGCACAAGCACGCCTTCCTGTG | |
| | CCTGTTCCTGCTGCCCAGCCTGGCCACCGTGGCCTACTTCAACATGGT | |
| | GTACATGCCCGCCAGCTGGGTGATGAGGATCATGACCTGGCTGGACAT | |
| | GGTGGACACCAGCCTGAGCGGCTTCAAGCTGAAGGACTGCGTGATGTA | |
| | CGCCAGCGCCGTGGTGCTGCTGATCCTGATGACCGCCAGGACCGTGT | |
| | ACGACGACGGCGCCAGGAGGGTGTGGACCCTGATGAACGTGCTGACC | |
| | CTGGTGTACAAGGTGTACTACGGCAACGCCCTGGACCAGGCCATCAGC | |
| | ATGTGGGCCCTGATCATCAGCGTGACCAGCAACTACAGCGGCGTGGTG | |
| | ACCACCGTGATGTTCCTGGCCAGGGGCATCGTGTTCATGTGCGTGGAG | |
| | TACTGCCCCATCTTCTTCATCACCGGCAACACCCTGCAGTGCATCATGC | |
| | TGGTGTACTGCTTCCTGGGCTACTTCTGCACCTGCTACTTCGGCCTGTT | |
| | CTGCCTGCTGAACAGGTACTTCAGGCTGACCCTGGGCGTGTACGACTA | |
| | CCTGGTGAGCACCCAGGAGTTCAGGTACATGAACAGCCAGGGCCTGCT | |
| | GCCCCCCAAGAACAGCATCGACGCCTTCAAGCTGAACATCAAGCTGCT | |
| | GGGCGTGGGCGGCAAGCCCTGCATCAAGGTGGCCACCGTGCAGGGAA | |
| | GCGGAGAGGGCAGGGGAAGTCTTCTAACATGCGGGGACGTGGAGGAA | |
| | AATCCCGGCCCCAGCAAGATGAGCGACGTGAAGTGCACCAGCGTGGT | |
| | GCTGCTGAGCGTGCTGCAGCAGCTGAGGGTGGAGAGCAGCAGCAAGC | |
| | TGTGGGCCCAGTGCGTGCAGCTGCACAACGACATCCTGCTGGCCAAG | |
| | GACACCACCGAGGCCTTCGAGAAGATGGTGAGCCTGCTGAGCGTGCT | |
| | GCTGAGCATGCAGGGCGCCGTGGACATCAACAAGCTGTGCGAGGAGA | |
| | TGCTGGACAACAGGGCCACCCTGCAGGGAAGCGGACAGTGTACTAATT | |
| | ATGCTCTCTTGAAATTGGCTGGAGATGTTGAGAGCAACCCAGGTCCCG | |
| | CCATCGCCAGCGAGTTCAGCAGCCTGCCCAGCTACGCCGCCTTCGCCA | |
| | CCGCCCAGGAGGCCTACGAGCAGGCCGTGGCCAACGGCGACAGCGA | |
| | GGTGGTGCTGAAGAAGCTGAAGAAGAGCCTGAACGTGGCCAAGAGCG | |
| | AGTTCGACAGGGACGCCGCCATGCAGAGGAAGCTGGAGAAGATGGCC | |
| | GACCAGGCCATGACCCAGATGTACAAGCAGGCCAGGAGCGAGGACAA | |
| | GAGGGCCAAGGTGACCAGCGCCATGCAGACCATGCTGTTCACCATGCT | |
| | GAGGAAGCTGGACAACGACGCCCTGAACAACATCATCAACAACGCCAG | |
| | GGACGGCTGCGTGCCCCTGAACATCATCCCCCTGACCACCGCCGCCA | |
| | AGCTGATGGTGGTGATCCCCGACTACAACACCTACAAGAACACCTGCG | |
| | ACGGCACCACCTTCACCTACGCCAGCGCCCTGTGGGAGATCCAGCAG | |
| | GTGGTGGACGCCGACAGCAAGATCGTGCAGCTGAGCGAGATCAGCAT | |
| | GGACAACAGCCCCAACCTGGCCTGGCCCCTGATCGTGACCGCCCTGA | |
| | GGGCCAACAGCGCCGTGAAGCTGCAGTGATGA | |
| 28 | ATGTTCGTGTTCCTGGTGCTGCTGCCCCTGGTGAGCAGCCAGTGCGTG | 311 |
| Pan-CoV | AACCTGACCACCAGGACCCAGCTGCCCCCCGCCTACACCAACAGCTTC | |
| mRNA Spike- | ACCAGGGGCGTGTACTACCCCGACAAGGTGTTCAGGAGCAGCGTGCT | |
| NSP9-NSP10- | GCACAGCACCCAGGACCTGTTCCTGCCCTTCTTCAGCAACGTGACCTG | |
| NSP13 | GTTCCACGCCATCCACGTGAGCGGCACCAACGGCACCAAGAGGTTCGA | |
| | CAACCCCGTGCTGCCCTTCAACGACGGCGTGTACTTCGCCAGCACCGA | |
| | GAAGAGCAACATCATCAGGGGCTGGATCTTCGGCACCACCCTGGACAG | |
| | CAAGACCCAGAGCCTGCTGATCGTGAACAACGCCACCAACGTGGTGAT | |
| | CAAGGTGTGCGAGTTCCAGTTCTGCAACGACCCCTTCCTGGGCGTGTA | |
| | CTACCACAAGAACAACAAGAGCTGGATGGAGAGCGAGTTCAGGGTGTA | |
| | CAGCAGCGCCAACAACTGCACCTTCGAGTACGTGAGCCAGCCCTTCCT | |
| | GATGGACCTGGAGGGCAAGCAGGGCAACTTCAAGAACCTGAGGGAGT | |
| | TCGTGTTCAAGAACATCGACGGCTACTTCAAGATCTACAGCAAGCACAC | |
| | CCCCATCAACCTGGTGAGGGACCTGCCCCAGGGCTTCAGCGCCCTGG | |
| | AGCCCCTGGTGGACCTGCCCATCGGCATCAACATCACCAGGTTCCAGA | |
| | CCCTGCTGGCCCTGCACAGGAGCTACCTGACCCCCGGCGACAGCAGC | |
| | AGCGGCTGGACCGCCGGCGCCGCCGCCTACTACGTGGGCTACCTGCA | |
| | GCCCAGGACCTTCCTGCTGAAGTACAACGAGAACGGCACCATCACCGA | |
| | CGCCGTGGACTGCGCCCTGGACCCCCTGAGCGAGACCAAGTGCACCC | |
| | TGAAGAGCTTCACCGTGGAGAAGGGCATCTACCAGACCAGCAACTTCA | |
| | GGGTGCAGCCCACCGAGAGCATCGTGAGGTTCCCCAACATCACCAACC | |
| | TGTGCCCCTTCGGCGAGGTGTTCAACGCCACCAGGTTCGCCAGCGTGT | |
| | ACGCCTGGAACAGGAAGAGGATCAGCAACTGCGTGGCCGACTACAGC | |
| | GTGCTGTACAACAGCGCCAGCTTCAGCACCTTCAAGTGCTACGGCGTG | |
| | AGCCCCACCAAGCTGAACGACCTGTGCTTCACCAACGTGTACGCCGAC | |
| | AGCTTCGTGATCAGGGGCGACGAGGTGAGGCAGATCGCCCCCGGCCA | |
| | GACCGGCAAGATCGCCGACTACAACTACAAGCTGCCCGACGACTTCAC | |
| | CGGCTGCGTGATCGCCTGGAACAGCAACAACCTGGACAGCAAGGTGG | |
| | GCGGCAACTACAACTACCTGTACAGGCTGTTCAGGAAGAGCAACCTGA | |
| | AGCCCTTCGAGAGGGACATCAGCACCGAGATCTACCAGGCCGGCAGC | |
| | ACCCCCTGCAACGGCGTGGAGGGCTTCAACTGCTACTTCCCCCTGCAG | |
| | AGCTACGGCTTCCAGCCCACCAACGGCGTGGGCTACCAGCCCTACAG | |
| | GGTGGTGGTGCTGAGCTTCGAGCTGCTGCACGCCCCCGCCACCGTGT | |
| | GCGGCCCCAAGAAGAGCACCAACCTGGTGAAGAACAAGTGCGTGAACT | |
| | TCAACTTCAACGGCCTGACCGGCACCGGCGTGCTGACCGAGAGCAACA | |
| | AGAAGTTCCTGCCCTTCCAGCAGTTCGGCAGGGACATCGCCGACACCA | |
| | CCGACGCCGTGAGGGACCCCCAGACCCTGGAGATCCTGGACATCACC | |
| | CCCTGCAGCTTCGGCGGCGTGAGCGTGATCACCCCCGGCACCAACAC | |
| | CAGCAACCAGGTGGCCGTGCTGTACCAGGACGTGAACTGCACCGAGG | |
| | TGCCCGTGGCCATCCACGCCGACCAGCTGACCCCCACCTGGAGGGTG | |
| | TACAGCACCGGCAGCAACGTGTTCCAGACCAGGGCCGGCTGCCTGAT | |
| | CGGCGCCGAGCACGTGAACAACAGCTACGAGTGCGACATCCCCATCG | |
| | GCGCCGGCATCTGCGCCAGCTACCAGACCCAGACCAACAGCCCCAGG | |
| | AGGGCCAGGAGCGTGGCCAGCCAGAGCATCATCGCCTACACCATGAG | |
| | CCTGGGCGCCGAGAACAGCGTGGCCTACAGCAACAACAGCATCGCCA | |
| | TCCCCACCAACTTCACCATCAGCGTGACCACCGAGATCCTGCCCGTGA | |
| | GCATGACCAAGACCAGCGTGGACTGCACCATGTACATCTGCGGCGACA | |
| | GCACCGAGTGCAGCAACCTGCTGCTGCAGTACGGCAGCTTCTGCACCC | |
| | AGCTGAACAGGGCCCTGACCGGCATCGCCGTGGAGCAGGACAAGAAC | |
| | ACCCAGGAGGTGTTCGCCCAGGTGAAGCAGATCTACAAGACCCCCCCC | |
| | ATCAAGGACTTCGGCGGCTTCAACTTCAGCCAGATCCTGCCCGACCCC | |
| | AGCAAGCCCAGCAAGAGGAGCTTCATCGAGGACCTGCTGTTCAACAAG | |
| | GTGACCCTGGCCGACGCCGGCTTCATCAAGCAGTACGGCGACTGCCT | |
| | GGGCGACATCGCCGCCAGGGACCTGATCTGCGCCCAGAAGTTCAACG | |
| | GCCTGACCGTGCTGCCCCCCCTGCTGACCGACGAGATGATCGCCCAG | |
| | TACACCAGCGCCCTGCTGGCCGGCACCATCACCAGCGGCTGGACCTT | |
| | CGGCGCCGGCGCCGCCCTGCAGATCCCCTTCGCCATGCAGATGGCCT | |
| | ACAGGTTCAACGGCATCGGCGTGACCCAGAACGTGCTGTACGAGAACC | |
| | AGAAGCTGATCGCCAACCAGTTCAACAGCGCCATCGGCAAGATCCAGG | |
| | ACAGCCTGAGCAGCACCGCCAGCGCCCTGGGCAAGCTGCAGGACGTG | |
| | GTGAACCAGAACGCCCAGGCCCTGAACACCCTGGTGAAGCAGCTGAG | |
| | CAGCAACTTCGGCGCCATCAGCAGCGTGCTGAACGACATCCTGAGCAG | |
| | GCTGGACCCCCCCGAGGCCGAGGTGCAGATCGACAGGCTGATCACCG | |
| | GCAGGCTGCAGAGCCTGCAGACCTACGTGACCCAGCAGCTGATCAGG | |
| | GCCGCCGAGATCAGGGCCAGCGCCAACCTGGCCGCCACCAAGATGAG | |
| | CGAGTGCGTGCTGGGCCAGAGCAAGAGGGTGGACTTCTGCGGCAAGG | |
| | GCTACCACCTGATGAGCTTCCCCCAGAGCGCCCCCCACGGCGTGGTG | |
| | TTCCTGCACGTGACCTACGTGCCCGCCCAGGAGAAGAACTTCACCACC | |
| | GCCCCCGCCATCTGCCACGACGGCAAGGCCCACTTCCCCAGGGAGGG | |
| | CGTGTTCGTGAGCAACGGCACCCACTGGTTCGTGACCCAGAGGAACTT | |
| | CTACGAGCCCCAGATCATCACCACCGACAACACCTTCGTGAGCGGCAA | |
| | CTGCGACGTGGTGATCGGCATCGTGAACAACACCGTGTACGACCCCCT | |
| | GCAGCCCGAGCTGGACAGCTTCAAGGAGGAGCTGGACAAGTACTTCAA | |
| | GAACCACACCAGCCCCGACGTGGACCTGGGCGACATCAGCGGCATCA | |
| | ACGCCAGCGTGGTGAACATCCAGAAGGAGATCGACAGGCTGAACGAG | |
| | GTGGCCAAGAACCTGAACGAGAGCCTGATCGACCTGCAGGAGCTGGG | |
| | CAAGTACGAGCAGTACATCAAGTGGCCCTGGTACATCTGGCTGGGCTT | |
| | CATCGCCGGCCTGATCGCCATCGTGATGGTGACCATCATGCTGTGCTG | |
| | CATGACCAGCTGCTGCAGCTGCCTGAAGGGCTGCTGCAGCTGCGGCA | |
| | GCTGCTGCAAGTTCGACGAGGACGACAGCGAGCCCGTGCTGAAGGGC | |
| | GTGAAGCTGCACTACACCGGAAGCGGAGCCACGAACTTCTCTCTGTTA | |
| | AAGCAAGCAGGAGATGTTGAAGAAAACCCCGGGCCTAACAACGAGCTG | |
| | AGCCCCGTGGCCCTGAGGCAGATGAGCTGCGCCGCCGGCACCACCCA | |
| | GACCGCCTGCACCGACGACAACGCCCTGGCCTACTACAACACCACCAA | |
| | GGGCGGCAGGTTCGTGCTGGCCCTGCTGAGCGACCTGCAGGACCTGA | |
| | AGTGGGCCAGGTTCCCCAAGAGCGACGGCACCGGCACCATCTACACC | |
| | GAGCTGGAGCCCCCCTGCAGGTTCGTGACCGACACCCCCAAGGGCCC | |
| | CAAGGTGAAGTACCTGTACTTCATCAAGGGCCTGAACAACCTGAACAG | |
| | GGGCATGGTGCTGGGCAGCCTGGCCGCCACCGTGAGGCTGCAGGGAA | |
| | GCGGAGAGGGCAGGGGAAGTCTTCTAACATGCGGGGACGTGGAGGAA | |
| | AATCCCGGCCCCGCCGGCAACGCCACCGAGGTGCCCGCCAACAGCAC | |
| | CGTGCTGAGCTTCTGCGCCTTCGCCGTGGACGCCGCCAAGGCCTACAA | |
| | GGACTACCTGGCCAGCGGCGGCCAGCCCATCACCAACTGCGTGAAGA | |
| | TGCTGTGCACCCACACCGGCACCGGCCAGGCCATCACCGTGACCCCC | |
| | GAGGCCAACATGGACCAGGAGAGCTTCGGCGGCGCCAGCTGCTGCCT | |
| | GTACTGCAGGTGCCACATCGACCACCCCAACCCCAAGGGCTTCTGCGA | |
| | CCTGAAGGGCAAGTACGTGCAGATCCCCACCACCTGCGCCAACGACCC | |
| | CGTGGGCTTCACCCTGAAGAACACCGTGTGCACCGTGTGCGGCATGTG | |
| | GAAGGGCTACGGCTGCAGCTGCGACCAGCTGAGGGAGCCCATGCTGC | |
| | AGGGAAGCGGACAGTGTACTAATTATGCTCTCTTGAAATTGGCTGGAGA | |
| | TGTTGAGAGCAACCCAGGTCCCGCCGTGGGCGCCTGCGTGCTGTGCA | |
| | ACAGCCAGACCAGCCTGAGGTGCGGCGCCTGCATCAGGAGGCCCTTC | |
| | CTGTGCTGCAAGTGCTGCTACGACCACGTGATCAGCACCAGCCACAAG | |
| | CTGGTGCTGAGCGTGAACCCCTACGTGTGCAACGCCCCCGGCTGCGA | |
| | CGTGACCGACGTGACCCAGCTGTACCTGGGCGGCATGAGCTACTACTG | |
| | CAAGAGCCACAAGCCCCCCATCAGCTTCCCCCTGTGCGCCAACGGCCA | |
| | GGTGTTCGGCCTGTACAAGAACACCTGCGTGGGCAGCGACAACGTGAC | |
| | CGACTTCAACGCCATCGCCACCTGCGACTGGACCAACGCCGGCGACTA | |
| | CATCCTGGCCAACACCTGCACCGAGAGGCTGAAGCTGTTCGCCGCCGA | |
| | GACCCTGAAGGCCACCGAGGAGACCTTCAAGCTGAGCTACGGCATCG | |
| | CCACCGTGAGGGAGGTGCTGAGCGACAGGGAGCTGCACCTGAGCTGG | |
| | GAGGTGGGCAAGCCCAGGCCCCCCCTGAACAGGAACTACGTGTTCAC | |
| | CGGCTACAGGGTGACCAAGAACAGCAAGGTGCAGATCGGCGAGTACA | |
| | CCTTCGAGAAGGGCGACTACGGCGACGCCGTGGTGTACAGGGGCACC | |
| | ACCACCTACAAGCTGAACGTGGGCGACTACTTCGTGCTGACCAGCCAC | |
| | ACCGTGATGCCCCTGAGCGCCCCCACCCTGGTGCCCCAGGAGCACTA | |
| | CGTGAGGATCACCGGCCTGTACCCCACCCTGAACATCAGCGACGAGTT | |
| | CAGCAGCAACGTGGCCAACTACCAGAAGGTGGGCATGCAGAAGTACAG | |
| | CACCCTGCAGGGCCCCCCCGGCACCGGCAAGAGCCACTTCGCCATCG | |
| | GCCTGGCCCTGTACTACCCCAGCGCCAGGATCGTGTACACCGCCTGCA | |
| | GCCACGCCGCCGTGGACGCCCTGTGCGAGAAGGCCCTGAAGTACCTG | |
| | CCCATCGACAAGTGCAGCAGGATCATCCCCGCCAGGGCCAGGGTGGA | |
| | GTGCTTCGACAAGTTCAAGGTGAACAGCACCCTGGAGCAGTACGTGTT | |
| | CTGCACCGTGAACGCCCTGCCCGAGACCACCGCCGACATCGTGGTGTT | |
| | CGACGAGATCAGCATGGCCACCAACTACGACCTGAGCGTGGTGAACGC | |
| | CAGGCTGAGGGCCAAGCACTACGTGTACATCGGCGACCCCGCCCAGC | |
| | TGCCCGCCCCCAGGACCCTGCTGACCAAGGGCACCCTGGAGCCCGAG | |
| | TACTTCAACAGCGTGTGCAGGCTGATGAAGACCATCGGCCCCGACATG | |
| | TTCCTGGGCACCTGCAGGAGGTGCCCCGCCGAGATCGTGGACACCGT | |
| | GAGCGCCCTGGTGTACGACAACAAGCTGAAGGCCCACAAGGACAAGA | |
| | GCGCCCAGTGCTTCAAGATGTTCTACAAGGGCGTGATCACCCACGACG | |
| | TGAGCAGCGCCATCAACAGGCCCCAGATCGGCGTGGTGAGGGAGTTC | |
| | CTGACCAGGAACCCCGCCTGGAGGAAGGCCGTGTTCATCAGCCCCTAC | |
| | AACAGCCAGAACGCCGTGGCCAGCAAGATCCTGGGCCTGCCCACCCA | |
| | GACCGTGGACAGCAGCCAGGGCAGCGAGTACGACTACGTGATCTTCAC | |
| | CCAGACCACCGAGACCGCCCACAGCTGCAACGTGAACAGGTTCAACGT | |
| | GGCCATCACCAGGGCCAAGGTGGGCATCCTGTGCATCATGAGCGACA | |
| | GGGACCTGTACGACAAGCTGCAGTTCACCAGCCTGGAGATCCCCAGGA | |
| | GGAACGTGGCCACCCTGCAGTGATGA | |
| 27 | ATGTTCGTGTTCCTGGTGCTGCTGCCCCTGGTGAGCAGCCAGTGCGTG | 312 |
| Pan-CoV | AACCTGACCACCAGGACCCAGCTGCCCCCCGCCTACACCAACAGCTTC | |
| mRNA | ACCAGGGGCGTGTACTACCCCGACAAGGTGTTCAGGAGCAGCGTGCT | |
| HexaPro- | GCACAGCACCCAGGACCTGTTCCTGCCCTTCTTCAGCAACGTGACCTG | |
| NSP9-NSP10- | GTTCCACGCCATCCACGTGAGCGGCACCAACGGCACCAAGAGGTTCGA | |
| NSP13 | CAACCCCGTGCTGCCCTTCAACGACGGCGTGTACTTCGCCAGCACCGA | |
| | GAAGAGCAACATCATCAGGGGCTGGATCTTCGGCACCACCCTGGACAG | |
| | CAAGACCCAGAGCCTGCTGATCGTGAACAACGCCACCAACGTGGTGAT | |
| | CAAGGTGTGCGAGTTCCAGTTCTGCAACGACCCCTTCCTGGGCGTGTA | |
| | CTACCACAAGAACAACAAGAGCTGGATGGAGAGCGAGTTCAGGGTGTA | |
| | CAGCAGCGCCAACAACTGCACCTTCGAGTACGTGAGCCAGCCCTTCCT | |
| | GATGGACCTGGAGGGCAAGCAGGGCAACTTCAAGAACCTGAGGGAGT | |
| | TCGTGTTCAAGAACATCGACGGCTACTTCAAGATCTACAGCAAGCACAC | |
| | CCCCATCAACCTGGTGAGGGACCTGCCCCAGGGCTTCAGCGCCCTGG | |
| | AGCCCCTGGTGGACCTGCCCATCGGCATCAACATCACCAGGTTCCAGA | |
| | CCCTGCTGGCCCTGCACAGGAGCTACCTGACCCCCGGCGACAGCAGC | |
| | AGCGGCTGGACCGCCGGCGCCGCCGCCTACTACGTGGGCTACCTGCA | |
| | GCCCAGGACCTTCCTGCTGAAGTACAACGAGAACGGCACCATCACCGA | |
| | CGCCGTGGACTGCGCCCTGGACCCCCTGAGCGAGACCAAGTGCACCC | |
| | TGAAGAGCTTCACCGTGGAGAAGGGCATCTACCAGACCAGCAACTTCA | |
| | GGGTGCAGCCCACCGAGAGCATCGTGAGGTTCCCCAACATCACCAACC | |
| | TGTGCCCCTTCGGCGAGGTGTTCAACGCCACCAGGTTCGCCAGCGTGT | |
| | ACGCCTGGAACAGGAAGAGGATCAGCAACTGCGTGGCCGACTACAGC | |
| | GTGCTGTACAACAGCGCCAGCTTCAGCACCTTCAAGTGCTACGGCGTG | |
| | AGCCCCACCAAGCTGAACGACCTGTGCTTCACCAACGTGTACGCCGAC | |
| | AGCTTCGTGATCAGGGGCGACGAGGTGAGGCAGATCGCCCCCGGCCA | |
| | GACCGGCAAGATCGCCGACTACAACTACAAGCTGCCCGACGACTTCAC | |
| | CGGCTGCGTGATCGCCTGGAACAGCAACAACCTGGACAGCAAGGTGG | |
| | GCGGCAACTACAACTACCTGTACAGGCTGTTCAGGAAGAGCAACCTGA | |
| | AGCCCTTCGAGAGGGACATCAGCACCGAGATCTACCAGGCCGGCAGC | |
| | ACCCCCTGCAACGGCGTGGAGGGCTTCAACTGCTACTTCCCCCTGCAG | |
| | AGCTACGGCTTCCAGCCCACCAACGGCGTGGGCTACCAGCCCTACAG | |
| | GGTGGTGGTGCTGAGCTTCGAGCTGCTGCACGCCCCCGCCACCGTGT | |
| | GCGGCCCCAAGAAGAGCACCAACCTGGTGAAGAACAAGTGCGTGAACT | |
| | TCAACTTCAACGGCCTGACCGGCACCGGCGTGCTGACCGAGAGCAACA | |
| | AGAAGTTCCTGCCCTTCCAGCAGTTCGGCAGGGACATCGCCGACACCA | |
| | CCGACGCCGTGAGGGACCCCCAGACCCTGGAGATCCTGGACATCACC | |
| | CCCTGCAGCTTCGGCGGCGTGAGCGTGATCACCCCCGGCACCAACAC | |
| | CAGCAACCAGGTGGCCGTGCTGTACCAGGACGTGAACTGCACCGAGG | |
| | TGCCCGTGGCCATCCACGCCGACCAGCTGACCCCCACCTGGAGGGTG | |
| | TACAGCACCGGCAGCAACGTGTTCCAGACCAGGGCCGGCTGCCTGAT | |
| | CGGCGCCGAGCACGTGAACAACAGCTACGAGTGCGACATCCCCATCG | |
| | GCGCCGGCATCTGCGCCAGCTACCAGACCCAGACCAACAGCCCCGGC | |
| | AGCGCCAGCAGCGTGGCCAGCCAGAGCATCATCGCCTACACCATGAG | |
| | CCTGGGCGCCGAGAACAGCGTGGCCTACAGCAACAACAGCATCGCCA | |
| | TCCCCACCAACTTCACCATCAGCGTGACCACCGAGATCCTGCCCGTGA | |
| | GCATGACCAAGACCAGCGTGGACTGCACCATGTACATCTGCGGCGACA | |
| | GCACCGAGTGCAGCAACCTGCTGCTGCAGTACGGCAGCTTCTGCACCC | |
| | AGCTGAACAGGGCCCTGACCGGCATCGCCGTGGAGCAGGACAAGAAC | |
| | ACCCAGGAGGTGTTCGCCCAGGTGAAGCAGATCTACAAGACCCCCCCC | |
| | ATCAAGGACTTCGGCGGCTTCAACTTCAGCCAGATCCTGCCCGACCCC | |
| | AGCAAGCCCAGCAAGAGGAGCCCCATCGAGGACCTGCTGTTCAACAAG | |
| | GTGACCCTGGCCGACGCCGGCTTCATCAAGCAGTACGGCGACTGCCT | |
| | GGGCGACATCGCCGCCAGGGACCTGATCTGCGCCCAGAAGTTCAACG | |
| | GCCTGACCGTGCTGCCCCCCCTGCTGACCGACGAGATGATCGCCCAG | |
| | TACACCAGCGCCCTGCTGGCCGGCACCATCACCAGCGGCTGGACCTT | |
| | CGGCGCCGGCCCCGCCCTGCAGATCCCCTTCCCCATGCAGATGGCCT | |
| | ACAGGTTCAACGGCATCGGCGTGACCCAGAACGTGCTGTACGAGAACC | |
| | AGAAGCTGATCGCCAACCAGTTCAACAGCGCCATCGGCAAGATCCAGG | |
| | ACAGCCTGAGCAGCACCCCCAGCGCCCTGGGCAAGCTGCAGGACGTG | |
| | GTGAACCAGAACGCCCAGGCCCTGAACACCCTGGTGAAGCAGCTGAG | |
| | CAGCAACTTCGGCGCCATCAGCAGCGTGCTGAACGACATCCTGAGCAG | |
| | GCTGGACCCCCCCGAGGCCGAGGTGCAGATCGACAGGCTGATCACCG | |
| | GCAGGCTGCAGAGCCTGCAGACCTACGTGACCCAGCAGCTGATCAGG | |
| | GCCGCCGAGATCAGGGCCAGCGCCAACCTGGCCGCCACCAAGATGAG | |
| | CGAGTGCGTGCTGGGCCAGAGCAAGAGGGTGGACTTCTGCGGCAAGG | |
| | GCTACCACCTGATGAGCTTCCCCCAGAGCGCCCCCCACGGCGTGGTG | |
| | TTCCTGCACGTGACCTACGTGCCCGCCCAGGAGAAGAACTTCACCACC | |
| | GCCCCCGCCATCTGCCACGACGGCAAGGCCCACTTCCCCAGGGAGGG | |
| | CGTGTTCGTGAGCAACGGCACCCACTGGTTCGTGACCCAGAGGAACTT | |
| | CTACGAGCCCCAGATCATCACCACCGACAACACCTTCGTGAGCGGCAA | |
| | CTGCGACGTGGTGATCGGCATCGTGAACAACACCGTGTACGACCCCCT | |
| | GCAGCCCGAGCTGGACAGCTTCAAGGAGGAGCTGGACAAGTACTTCAA | |
| | GAACCACACCAGCCCCGACGTGGACCTGGGCGACATCAGCGGCATCA | |
| | ACGCCAGCGTGGTGAACATCCAGAAGGAGATCGACAGGCTGAACGAG | |
| | GTGGCCAAGAACCTGAACGAGAGCCTGATCGACCTGCAGGAGCTGGG | |
| | CAAGTACGAGCAGTACATCAAGTGGCCCTGGTACATCTGGCTGGGCTT | |
| | CATCGCCGGCCTGATCGCCATCGTGATGGTGACCATCATGCTGTGCTG | |
| | CATGACCAGCTGCTGCAGCTGCCTGAAGGGCTGCTGCAGCTGCGGCA | |
| | GCTGCTGCAAGTTCGACGAGGACGACAGCGAGCCCGTGCTGAAGGGC | |
| | GTGAAGCTGCACTACACCGGAAGCGGAGCCACGAACTTCTCTCTGTTA | |
| | AAGCAAGCAGGAGATGTTGAAGAAAACCCCGGGCCTAACAACGAGCTG | |
| | AGCCCCGTGGCCCTGAGGCAGATGAGCTGCGCCGCCGGCACCACCCA | |
| | GACCGCCTGCACCGACGACAACGCCCTGGCCTACTACAACACCACCAA | |
| | GGGCGGCAGGTTCGTGCTGGCCCTGCTGAGCGACCTGCAGGACCTGA | |
| | AGTGGGCCAGGTTCCCCAAGAGCGACGGCACCGGCACCATCTACACC | |
| | GAGCTGGAGCCCCCCTGCAGGTTCGTGACCGACACCCCCAAGGGCCC | |
| | CAAGGTGAAGTACCTGTACTTCATCAAGGGCCTGAACAACCTGAACAG | |
| | GGGCATGGTGCTGGGCAGCCTGGCCGCCACCGTGAGGCTGCAGGGAA | |
| | GCGGAGAGGGCAGGGGAAGTCTTCTAACATGCGGGGACGTGGAGGAA | |
| | AATCCCGGCCCCGCCGGCAACGCCACCGAGGTGCCCGCCAACAGCAC | |
| | CGTGCTGAGCTTCTGCGCCTTCGCCGTGGACGCCGCCAAGGCCTACAA | |
| | GGACTACCTGGCCAGCGGCGGCCAGCCCATCACCAACTGCGTGAAGA | |
| | TGCTGTGCACCCACACCGGCACCGGCCAGGCCATCACCGTGACCCCC | |
| | GAGGCCAACATGGACCAGGAGAGCTTCGGCGGCGCCAGCTGCTGCCT | |
| | GTACTGCAGGTGCCACATCGACCACCCCAACCCCAAGGGCTTCTGCGA | |
| | CCTGAAGGGCAAGTACGTGCAGATCCCCACCACCTGCGCCAACGACCC | |
| | CGTGGGCTTCACCCTGAAGAACACCGTGTGCACCGTGTGCGGCATGTG | |
| | GAAGGGCTACGGCTGCAGCTGCGACCAGCTGAGGGAGCCCATGCTGC | |
| | AGGGAAGCGGACAGTGTACTAATTATGCTCTCTTGAAATTGGCTGGAGA | |
| | TGTTGAGAGCAACCCAGGTCCCGCCGTGGGCGCCTGCGTGCTGTGCA | |
| | ACAGCCAGACCAGCCTGAGGTGCGGCGCCTGCATCAGGAGGCCCTTC | |
| | CTGTGCTGCAAGTGCTGCTACGACCACGTGATCAGCACCAGCCACAAG | |
| | CTGGTGCTGAGCGTGAACCCCTACGTGTGCAACGCCCCCGGCTGCGA | |
| | CGTGACCGACGTGACCCAGCTGTACCTGGGCGGCATGAGCTACTACTG | |
| | CAAGAGCCACAAGCCCCCCATCAGCTTCCCCCTGTGCGCCAACGGCCA | |
| | GGTGTTCGGCCTGTACAAGAACACCTGCGTGGGCAGCGACAACGTGAC | |
| | CGACTTCAACGCCATCGCCACCTGCGACTGGACCAACGCCGGCGACTA | |
| | CATCCTGGCCAACACCTGCACCGAGAGGCTGAAGCTGTTCGCCGCCGA | |
| | GACCCTGAAGGCCACCGAGGAGACCTTCAAGCTGAGCTACGGCATCG | |
| | CCACCGTGAGGGAGGTGCTGAGCGACAGGGAGCTGCACCTGAGCTGG | |
| | GAGGTGGGCAAGCCCAGGCCCCCCCTGAACAGGAACTACGTGTTCAC | |
| | CGGCTACAGGGTGACCAAGAACAGCAAGGTGCAGATCGGCGAGTACA | |
| | CCTTCGAGAAGGGCGACTACGGCGACGCCGTGGTGTACAGGGGCACC | |
| | ACCACCTACAAGCTGAACGTGGGCGACTACTTCGTGCTGACCAGCCAC | |
| | ACCGTGATGCCCCTGAGCGCCCCCACCCTGGTGCCCCAGGAGCACTA | |
| | CGTGAGGATCACCGGCCTGTACCCCACCCTGAACATCAGCGACGAGTT | |
| | CAGCAGCAACGTGGCCAACTACCAGAAGGTGGGCATGCAGAAGTACAG | |
| | CACCCTGCAGGGCCCCCCCGGCACCGGCAAGAGCCACTTCGCCATCG | |
| | GCCTGGCCCTGTACTACCCCAGCGCCAGGATCGTGTACACCGCCTGCA | |
| | GCCACGCCGCCGTGGACGCCCTGTGCGAGAAGGCCCTGAAGTACCTG | |
| | CCCATCGACAAGTGCAGCAGGATCATCCCCGCCAGGGCCAGGGTGGA | |
| | GTGCTTCGACAAGTTCAAGGTGAACAGCACCCTGGAGCAGTACGTGTT | |
| | CTGCACCGTGAACGCCCTGCCCGAGACCACCGCCGACATCGTGGTGTT | |
| | CGACGAGATCAGCATGGCCACCAACTACGACCTGAGCGTGGTGAACGC | |
| | CAGGCTGAGGGCCAAGCACTACGTGTACATCGGCGACCCCGCCCAGC | |
| | TGCCCGCCCCCAGGACCCTGCTGACCAAGGGCACCCTGGAGCCCGAG | |
| | TACTTCAACAGCGTGTGCAGGCTGATGAAGACCATCGGCCCCGACATG | |
| | TTCCTGGGCACCTGCAGGAGGTGCCCCGCCGAGATCGTGGACACCGT | |
| | GAGCGCCCTGGTGTACGACAACAAGCTGAAGGCCCACAAGGACAAGA | |
| | GCGCCCAGTGCTTCAAGATGTTCTACAAGGGCGTGATCACCCACGACG | |
| | TGAGCAGCGCCATCAACAGGCCCCAGATCGGCGTGGTGAGGGAGTTC | |
| | CTGACCAGGAACCCCGCCTGGAGGAAGGCCGTGTTCATCAGCCCCTAC | |
| | AACAGCCAGAACGCCGTGGCCAGCAAGATCCTGGGCCTGCCCACCCA | |
| | GACCGTGGACAGCAGCCAGGGCAGCGAGTACGACTACGTGATCTTCAC | |
| | CCAGACCACCGAGACCGCCCACAGCTGCAACGTGAACAGGTTCAACGT | |
| | GGCCATCACCAGGGCCAAGGTGGGCATCCTGTGCATCATGAGCGACA | |
| | GGGACCTGTACGACAAGCTGCAGTTCACCAGCCTGGAGATCCCCAGGA | |
| | GGAACGTGGCCACCCTGCAGTGATGA | |
| 28 | ATGTTCGTGTTCCTGGTGCTGCTGCCCCTGGTGAGCAGCCAGTGCGTG | 313 |
| Pan-CoV | AACCTGACCACCAGGACCCAGCTGCCCCCCGCCTACACCAACAGCTTC | |
| mRNA Spike- | ACCAGGGGCGTGTACTACCCCGACAAGGTGTTCAGGAGCAGCGTGCT | |
| NSP14- | GCACAGCACCCAGGACCTGTTCCTGCCCTTCTTCAGCAACGTGACCTG | |
| NSP15 | GTTCCACGCCATCCACGTGAGCGGCACCAACGGCACCAAGAGGTTCGA | |
| | CAACCCCGTGCTGCCCTTCAACGACGGCGTGTACTTCGCCAGCACCGA | |
| | GAAGAGCAACATCATCAGGGGCTGGATCTTCGGCACCACCCTGGACAG | |
| | CAAGACCCAGAGCCTGCTGATCGTGAACAACGCCACCAACGTGGTGAT | |
| | CAAGGTGTGCGAGTTCCAGTTCTGCAACGACCCCTTCCTGGGCGTGTA | |
| | CTACCACAAGAACAACAAGAGCTGGATGGAGAGCGAGTTCAGGGTGTA | |
| | CAGCAGCGCCAACAACTGCACCTTCGAGTACGTGAGCCAGCCCTTCCT | |
| | GATGGACCTGGAGGGCAAGCAGGGCAACTTCAAGAACCTGAGGGAGT | |
| | TCGTGTTCAAGAACATCGACGGCTACTTCAAGATCTACAGCAAGCACAC | |
| | CCCCATCAACCTGGTGAGGGACCTGCCCCAGGGCTTCAGCGCCCTGG | |
| | AGCCCCTGGTGGACCTGCCCATCGGCATCAACATCACCAGGTTCCAGA | |
| | CCCTGCTGGCCCTGCACAGGAGCTACCTGACCCCCGGCGACAGCAGC | |
| | AGCGGCTGGACCGCCGGCGCCGCCGCCTACTACGTGGGCTACCTGCA | |
| | GCCCAGGACCTTCCTGCTGAAGTACAACGAGAACGGCACCATCACCGA | |
| | CGCCGTGGACTGCGCCCTGGACCCCCTGAGCGAGACCAAGTGCACCC | |
| | TGAAGAGCTTCACCGTGGAGAAGGGCATCTACCAGACCAGCAACTTCA | |
| | GGGTGCAGCCCACCGAGAGCATCGTGAGGTTCCCCAACATCACCAACC | |
| | TGTGCCCCTTCGGCGAGGTGTTCAACGCCACCAGGTTCGCCAGCGTGT | |
| | ACGCCTGGAACAGGAAGAGGATCAGCAACTGCGTGGCCGACTACAGC | |
| | GTGCTGTACAACAGCGCCAGCTTCAGCACCTTCAAGTGCTACGGCGTG | |
| | AGCCCCACCAAGCTGAACGACCTGTGCTTCACCAACGTGTACGCCGAC | |
| | AGCTTCGTGATCAGGGGCGACGAGGTGAGGCAGATCGCCCCCGGCCA | |
| | GACCGGCAAGATCGCCGACTACAACTACAAGCTGCCCGACGACTTCAC | |
| | CGGCTGCGTGATCGCCTGGAACAGCAACAACCTGGACAGCAAGGTGG | |
| | GCGGCAACTACAACTACCTGTACAGGCTGTTCAGGAAGAGCAACCTGA | |
| | AGCCCTTCGAGAGGGACATCAGCACCGAGATCTACCAGGCCGGCAGC | |
| | ACCCCCTGCAACGGCGTGGAGGGCTTCAACTGCTACTTCCCCCTGCAG | |
| | AGCTACGGCTTCCAGCCCACCAACGGCGTGGGCTACCAGCCCTACAG | |
| | GGTGGTGGTGCTGAGCTTCGAGCTGCTGCACGCCCCCGCCACCGTGT | |
| | GCGGCCCCAAGAAGAGCACCAACCTGGTGAAGAACAAGTGCGTGAACT | |
| | TCAACTTCAACGGCCTGACCGGCACCGGCGTGCTGACCGAGAGCAACA | |
| | AGAAGTTCCTGCCCTTCCAGCAGTTCGGCAGGGACATCGCCGACACCA | |
| | CCGACGCCGTGAGGGACCCCCAGACCCTGGAGATCCTGGACATCACC | |
| | CCCTGCAGCTTCGGCGGCGTGAGCGTGATCACCCCCGGCACCAACAC | |
| | CAGCAACCAGGTGGCCGTGCTGTACCAGGACGTGAACTGCACCGAGG | |
| | TGCCCGTGGCCATCCACGCCGACCAGCTGACCCCCACCTGGAGGGTG | |
| | TACAGCACCGGCAGCAACGTGTTCCAGACCAGGGCCGGCTGCCTGAT | |
| | CGGCGCCGAGCACGTGAACAACAGCTACGAGTGCGACATCCCCATCG | |
| | GCGCCGGCATCTGCGCCAGCTACCAGACCCAGACCAACAGCCCCAGG | |
| | AGGGCCAGGAGCGTGGCCAGCCAGAGCATCATCGCCTACACCATGAG | |
| | CCTGGGCGCCGAGAACAGCGTGGCCTACAGCAACAACAGCATCGCCA | |
| | TCCCCACCAACTTCACCATCAGCGTGACCACCGAGATCCTGCCCGTGA | |
| | GCATGACCAAGACCAGCGTGGACTGCACCATGTACATCTGCGGCGACA | |
| | GCACCGAGTGCAGCAACCTGCTGCTGCAGTACGGCAGCTTCTGCACCC | |
| | AGCTGAACAGGGCCCTGACCGGCATCGCCGTGGAGCAGGACAAGAAC | |
| | ACCCAGGAGGTGTTCGCCCAGGTGAAGCAGATCTACAAGACCCCCCCC | |
| | ATCAAGGACTTCGGCGGCTTCAACTTCAGCCAGATCCTGCCCGACCCC | |
| | AGCAAGCCCAGCAAGAGGAGCTTCATCGAGGACCTGCTGTTCAACAAG | |
| | GTGACCCTGGCCGACGCCGGCTTCATCAAGCAGTACGGCGACTGCCT | |
| | GGGCGACATCGCCGCCAGGGACCTGATCTGCGCCCAGAAGTTCAACG | |
| | GCCTGACCGTGCTGCCCCCCCTGCTGACCGACGAGATGATCGCCCAG | |
| | TACACCAGCGCCCTGCTGGCCGGCACCATCACCAGCGGCTGGACCTT | |
| | CGGCGCCGGCGCCGCCCTGCAGATCCCCTTCGCCATGCAGATGGCCT | |
| | ACAGGTTCAACGGCATCGGCGTGACCCAGAACGTGCTGTACGAGAACC | |
| | AGAAGCTGATCGCCAACCAGTTCAACAGCGCCATCGGCAAGATCCAGG | |
| | ACAGCCTGAGCAGCACCGCCAGCGCCCTGGGCAAGCTGCAGGACGTG | |
| | GTGAACCAGAACGCCCAGGCCCTGAACACCCTGGTGAAGCAGCTGAG | |
| | CAGCAACTTCGGCGCCATCAGCAGCGTGCTGAACGACATCCTGAGCAG | |
| | GCTGGACCCCCCCGAGGCCGAGGTGCAGATCGACAGGCTGATCACCG | |
| | GCAGGCTGCAGAGCCTGCAGACCTACGTGACCCAGCAGCTGATCAGG | |
| | GCCGCCGAGATCAGGGCCAGCGCCAACCTGGCCGCCACCAAGATGAG | |
| | CGAGTGCGTGCTGGGCCAGAGCAAGAGGGTGGACTTCTGCGGCAAGG | |
| | GCTACCACCTGATGAGCTTCCCCCAGAGCGCCCCCCACGGCGTGGTG | |
| | TTCCTGCACGTGACCTACGTGCCCGCCCAGGAGAAGAACTTCACCACC | |
| | GCCCCCGCCATCTGCCACGACGGCAAGGCCCACTTCCCCAGGGAGGG | |
| | CGTGTTCGTGAGCAACGGCACCCACTGGTTCGTGACCCAGAGGAACTT | |
| | CTACGAGCCCCAGATCATCACCACCGACAACACCTTCGTGAGCGGCAA | |
| | CTGCGACGTGGTGATCGGCATCGTGAACAACACCGTGTACGACCCCCT | |
| | GCAGCCCGAGCTGGACAGCTTCAAGGAGGAGCTGGACAAGTACTTCAA | |
| | GAACCACACCAGCCCCGACGTGGACCTGGGCGACATCAGCGGCATCA | |
| | ACGCCAGCGTGGTGAACATCCAGAAGGAGATCGACAGGCTGAACGAG | |
| | GTGGCCAAGAACCTGAACGAGAGCCTGATCGACCTGCAGGAGCTGGG | |
| | CAAGTACGAGCAGTACATCAAGTGGCCCTGGTACATCTGGCTGGGCTT | |
| | CATCGCCGGCCTGATCGCCATCGTGATGGTGACCATCATGCTGTGCTG | |
| | CATGACCAGCTGCTGCAGCTGCCTGAAGGGCTGCTGCAGCTGCGGCA | |
| | GCTGCTGCAAGTTCGACGAGGACGACAGCGAGCCCGTGCTGAAGGGC | |
| | GTGAAGCTGCACTACACCGGAAGCGGAGCCACGAACTTCTCTCTGTTA | |
| | AAGCAAGCAGGAGATGTTGAAGAAAACCCCGGGCCTGCCGAGAACGT | |
| | GACCGGCCTGTTCAAGGACTGCAGCAAGGTGATCACCGGCCTGCACC | |
| | CCACCCAGGCCCCCACCCACCTGAGCGTGGACACCAAGTTCAAGACC | |
| | GAGGGCCTGTGCGTGGACATCCCCGGCATCCCCAAGGACATGACCTA | |
| | CAGGAGGCTGATCAGCATGATGGGCTTCAAGATGAACTACCAGGTGAA | |
| | CGGCTACCCCAACATGTTCATCACCAGGGAGGAGGCCATCAGGCACGT | |
| | GAGGGCCTGGATCGGCTTCGACGTGGAGGGCTGCCACGCCACCAGGG | |
| | AGGCCGTGGGCACCAACCTGCCCCTGCAGCTGGGCTTCAGCACCGGC | |
| | GTGAACCTGGTGGCCGTGCCCACCGGCTACGTGGACACCCCCAACAA | |
| | CACCGACTTCAGCAGGGTGAGCGCCAAGCCCCCCCCCGGCGACCAGT | |
| | TCAAGCACCTGATCCCCCTGATGTACAAGGGCCTGCCCTGGAACGTGG | |
| | TGAGGATCAAGATCGTGCAGATGCTGAGCGACACCCTGAAGAACCTGA | |
| | GCGACAGGGTGGTGTTCGTGCTGTGGGCCCACGGCTTCGAGCTGACC | |
| | AGCATGAAGTACTTCGTGAAGATCGGCCCCGAGAGGACCTGCTGCCTG | |
| | TGCGACAGGAGGGCCACCTGCTTCAGCACCGCCAGCGACACCTACGC | |
| | CTGCTGGCACCACAGCATCGGCTTCGACTACGTGTACAACCCCTTCAT | |
| | GATCGACGTGCAGCAGTGGGGCTTCACCGGCAACCTGCAGAGCAACC | |
| | ACGACCTGTACTGCCAGGTGCACGGCAACGCCCACGTGGCCAGCTGC | |
| | GACGCCATCATGACCAGGTGCCTGGCCGTGCACGAGTGCTTCGTGAAG | |
| | AGGGTGGACTGGACCATCGAGTACCCCATCATCGGCGACGAGCTGAA | |
| | GATCAACGCCGCCTGCAGGAAGGTGCAGCACATGGTGGTGAAGGCCG | |
| | CCCTGCTGGCCGACAAGTTCCCCGTGCTGCACGACATCGGCAACCCCA | |
| | AGGCCATCAAGTGCGTGCCCCAGGCCGACGTGGAGTGGAAGTTCTAC | |
| | GACGCCCAGCCCTGCAGCGACAAGGCCTACAAGATCGAGGAGCTGTT | |
| | CTACAGCTACGCCACCCACAGCGACAAGTTCACCGACGGCGTGTGCCT | |
| | GTTCTGGAACTGCAACGTGGACAGGTACCCCGCCAACAGCATCGTGTG | |
| | CAGGTTCGACACCAGGGTGCTGAGCAACCTGAACCTGCCCGGCTGCG | |
| | ACGGCGGCAGCCTGTACGTGAACAAGCACGCCTTCCACACCCCCGCCT | |
| | TCGACAAGAGCGCCTTCGTGAACCTGAAGCAGCTGCCCTTCTTCTACTA | |
| | CAGCGACAGCCCCTGCGAGAGCCACGGCAAGCAGGTGGTGAGCGACA | |
| | TCGACTACGTGCCCCTGAAGAGCGCCACCTGCATCACCAGGTGCAACC | |
| | TGGGCGGCGCCGTGTGCAGGCACCACGCCAACGAGTACAGGCTGTAC | |
| | CTGGACGCCTACAACATGATGATCAGCGCCGGCTTCAGCCTGTGGGTG | |
| | TACAAGCAGTTCGACACCTACAACCTGTGGAACACCTTCACCAGGCTG | |
| | CAGGGAAGCGGAGAGGGCAGGGGAAGTCTTCTAACATGCGGGGACGT | |
| | GGAGGAAAATCCCGGCCCCAGCCTGGAGAACGTGGCCTTCAACGTGG | |
| | TGAACAAGGGCCACTTCGACGGCCAGCAGGGCGAGGTGCCCGTGAGC | |
| | ATCATCAACAACACCGTGTACACCAAGGTGGACGGCGTGGACGTGGAG | |
| | CTGTTCGAGAACAAGACCACCCTGCCCGTGAACGTGGCCTTCGAGCTG | |
| | TGGGCCAAGAGGAACATCAAGCCCGTGCCCGAGGTGAAGATCCTGAAC | |
| | AACCTGGGCGTGGACATCGCCGCCAACACCGTGATCTGGGACTACAAG | |
| | AGGGACGCCCCCGCCCACATCAGCACCATCGGCGTGTGCAGCATGAC | |
| | CGACATCGCCAAGAAGCCCACCGAGACCATCTGCGCCCCCCTGACCGT | |
| | GTTCTTCGACGGCAGGGTGGACGGCCAGGTGGACCTGTTCAGGAACG | |
| | CCAGGAACGGCGTGCTGATCACCGAGGGCAGCGTGAAGGGCCTGCAG | |
| | CCCAGCGTGGGCCCCAAGCAGGCCAGCCTGAACGGCGTGACCCTGAT | |
| | CGGCGAGGCCGTGAAGACCCAGTTCAACTACTACAAGAAGGTGGACG | |
| | GCGTGGTGCAGCAGCTGCCCGAGACCTACTTCACCCAGAGCAGGAAC | |
| | CTGCAGGAGTTCAAGCCCAGGAGCCAGATGGAGATCGACTTCCTGGAG | |
| | CTGGCCATGGACGAGTTCATCGAGAGGTACAAGCTGGAGGGCTACGC | |
| | CTTCGAGCACATCGTGTACGGCGACTTCAGCCACAGCCAGCTGGGCG | |
| | GCCTGCACCTGCTGATCGGCCTGGCCAAGAGGTTCAAGGAGAGCCCC | |
| | TTCGAGCTGGAGGACTTCATCCCCATGGACAGCACCGTGAAGAACTAC | |
| | TTCATCACCGACGCCCAGACCGGCAGCAGCAAGTGCGTGTGCAGCGT | |
| | GATCGACCTGCTGCTGGACGACTTCGTGGAGATCATCAAGAGCCAGGA | |
| | CCTGAGCGTGGTGAGCAAGGTGGTGAAGGTGACCATCGACTACACCGA | |
| | GATCAGCTTCATGCTGTGGTGCAAGGACGGCCACGTGGAGACCTTCTA | |
| | CCCCAAGCTGCAGTGATGA | |
| 29 | ATGTTCGTGTTCCTGGTGCTGCTGCCCCTGGTGAGCAGCCAGTGCGTG | 314 |
| Pan-CoV | AACCTGACCACCAGGACCCAGCTGCCCCCCGCCTACACCAACAGCTTC | |
| mRNA | ACCAGGGGCGTGTACTACCCCGACAAGGTGTTCAGGAGCAGCGTGCT | |
| HexaPro- | GCACAGCACCCAGGACCTGTTCCTGCCCTTCTTCAGCAACGTGACCTG | |
| NSP14- | GTTCCACGCCATCCACGTGAGCGGCACCAACGGCACCAAGAGGTTCGA | |
| NSP15 | CAACCCCGTGCTGCCCTTCAACGACGGCGTGTACTTCGCCAGCACCGA | |
| | GAAGAGCAACATCATCAGGGGCTGGATCTTCGGCACCACCCTGGACAG | |
| | CAAGACCCAGAGCCTGCTGATCGTGAACAACGCCACCAACGTGGTGAT | |
| | CAAGGTGTGCGAGTTCCAGTTCTGCAACGACCCCTTCCTGGGCGTGTA | |
| | CTACCACAAGAACAACAAGAGCTGGATGGAGAGCGAGTTCAGGGTGTA | |
| | CAGCAGCGCCAACAACTGCACCTTCGAGTACGTGAGCCAGCCCTTCCT | |
| | GATGGACCTGGAGGGCAAGCAGGGCAACTTCAAGAACCTGAGGGAGT | |
| | TCGTGTTCAAGAACATCGACGGCTACTTCAAGATCTACAGCAAGCACAC | |
| | CCCCATCAACCTGGTGAGGGACCTGCCCCAGGGCTTCAGCGCCCTGG | |
| | AGCCCCTGGTGGACCTGCCCATCGGCATCAACATCACCAGGTTCCAGA | |
| | CCCTGCTGGCCCTGCACAGGAGCTACCTGACCCCCGGCGACAGCAGC | |
| | AGCGGCTGGACCGCCGGCGCCGCCGCCTACTACGTGGGCTACCTGCA | |
| | GCCCAGGACCTTCCTGCTGAAGTACAACGAGAACGGCACCATCACCGA | |
| | CGCCGTGGACTGCGCCCTGGACCCCCTGAGCGAGACCAAGTGCACCC | |
| | TGAAGAGCTTCACCGTGGAGAAGGGCATCTACCAGACCAGCAACTTCA | |
| | GGGTGCAGCCCACCGAGAGCATCGTGAGGTTCCCCAACATCACCAACC | |
| | TGTGCCCCTTCGGCGAGGTGTTCAACGCCACCAGGTTCGCCAGCGTGT | |
| | ACGCCTGGAACAGGAAGAGGATCAGCAACTGCGTGGCCGACTACAGC | |
| | GTGCTGTACAACAGCGCCAGCTTCAGCACCTTCAAGTGCTACGGCGTG | |
| | AGCCCCACCAAGCTGAACGACCTGTGCTTCACCAACGTGTACGCCGAC | |
| | AGCTTCGTGATCAGGGGCGACGAGGTGAGGCAGATCGCCCCCGGCCA | |
| | GACCGGCAAGATCGCCGACTACAACTACAAGCTGCCCGACGACTTCAC | |
| | CGGCTGCGTGATCGCCTGGAACAGCAACAACCTGGACAGCAAGGTGG | |
| | GCGGCAACTACAACTACCTGTACAGGCTGTTCAGGAAGAGCAACCTGA | |
| | AGCCCTTCGAGAGGGACATCAGCACCGAGATCTACCAGGCCGGCAGC | |
| | ACCCCCTGCAACGGCGTGGAGGGCTTCAACTGCTACTTCCCCCTGCAG | |
| | AGCTACGGCTTCCAGCCCACCAACGGCGTGGGCTACCAGCCCTACAG | |
| | GGTGGTGGTGCTGAGCTTCGAGCTGCTGCACGCCCCCGCCACCGTGT | |
| | GCGGCCCCAAGAAGAGCACCAACCTGGTGAAGAACAAGTGCGTGAACT | |
| | TCAACTTCAACGGCCTGACCGGCACCGGCGTGCTGACCGAGAGCAACA | |
| | AGAAGTTCCTGCCCTTCCAGCAGTTCGGCAGGGACATCGCCGACACCA | |
| | CCGACGCCGTGAGGGACCCCCAGACCCTGGAGATCCTGGACATCACC | |
| | CCCTGCAGCTTCGGCGGCGTGAGCGTGATCACCCCCGGCACCAACAC | |
| | CAGCAACCAGGTGGCCGTGCTGTACCAGGACGTGAACTGCACCGAGG | |
| | TGCCCGTGGCCATCCACGCCGACCAGCTGACCCCCACCTGGAGGGTG | |
| | TACAGCACCGGCAGCAACGTGTTCCAGACCAGGGCCGGCTGCCTGAT | |
| | CGGCGCCGAGCACGTGAACAACAGCTACGAGTGCGACATCCCCATCG | |
| | GCGCCGGCATCTGCGCCAGCTACCAGACCCAGACCAACAGCCCCGGC | |
| | AGCGCCAGCAGCGTGGCCAGCCAGAGCATCATCGCCTACACCATGAG | |
| | CCTGGGCGCCGAGAACAGCGTGGCCTACAGCAACAACAGCATCGCCA | |
| | TCCCCACCAACTTCACCATCAGCGTGACCACCGAGATCCTGCCCGTGA | |
| | GCATGACCAAGACCAGCGTGGACTGCACCATGTACATCTGCGGCGACA | |
| | GCACCGAGTGCAGCAACCTGCTGCTGCAGTACGGCAGCTTCTGCACCC | |
| | AGCTGAACAGGGCCCTGACCGGCATCGCCGTGGAGCAGGACAAGAAC | |
| | ACCCAGGAGGTGTTCGCCCAGGTGAAGCAGATCTACAAGACCCCCCCC | |
| | ATCAAGGACTTCGGCGGCTTCAACTTCAGCCAGATCCTGCCCGACCCC | |
| | AGCAAGCCCAGCAAGAGGAGCCCCATCGAGGACCTGCTGTTCAACAAG | |
| | GTGACCCTGGCCGACGCCGGCTTCATCAAGCAGTACGGCGACTGCCT | |
| | GGGCGACATCGCCGCCAGGGACCTGATCTGCGCCCAGAAGTTCAACG | |
| | GCCTGACCGTGCTGCCCCCCCTGCTGACCGACGAGATGATCGCCCAG | |
| | TACACCAGCGCCCTGCTGGCCGGCACCATCACCAGCGGCTGGACCTT | |
| | CGGCGCCGGCCCCGCCCTGCAGATCCCCTTCCCCATGCAGATGGCCT | |
| | ACAGGTTCAACGGCATCGGCGTGACCCAGAACGTGCTGTACGAGAACC | |
| | AGAAGCTGATCGCCAACCAGTTCAACAGCGCCATCGGCAAGATCCAGG | |
| | ACAGCCTGAGCAGCACCCCCAGCGCCCTGGGCAAGCTGCAGGACGTG | |
| | GTGAACCAGAACGCCCAGGCCCTGAACACCCTGGTGAAGCAGCTGAG | |
| | CAGCAACTTCGGCGCCATCAGCAGCGTGCTGAACGACATCCTGAGCAG | |
| | GCTGGACCCCCCCGAGGCCGAGGTGCAGATCGACAGGCTGATCACCG | |
| | GCAGGCTGCAGAGCCTGCAGACCTACGTGACCCAGCAGCTGATCAGG | |
| | GCCGCCGAGATCAGGGCCAGCGCCAACCTGGCCGCCACCAAGATGAG | |
| | CGAGTGCGTGCTGGGCCAGAGCAAGAGGGTGGACTTCTGCGGCAAGG | |
| | GCTACCACCTGATGAGCTTCCCCCAGAGCGCCCCCCACGGCGTGGTG | |
| | TTCCTGCACGTGACCTACGTGCCCGCCCAGGAGAAGAACTTCACCACC | |
| | GCCCCCGCCATCTGCCACGACGGCAAGGCCCACTTCCCCAGGGAGGG | |
| | CGTGTTCGTGAGCAACGGCACCCACTGGTTCGTGACCCAGAGGAACTT | |
| | CTACGAGCCCCAGATCATCACCACCGACAACACCTTCGTGAGCGGCAA | |
| | CTGCGACGTGGTGATCGGCATCGTGAACAACACCGTGTACGACCCCCT | |
| | GCAGCCCGAGCTGGACAGCTTCAAGGAGGAGCTGGACAAGTACTTCAA | |
| | GAACCACACCAGCCCCGACGTGGACCTGGGCGACATCAGCGGCATCA | |
| | ACGCCAGCGTGGTGAACATCCAGAAGGAGATCGACAGGCTGAACGAG | |
| | GTGGCCAAGAACCTGAACGAGAGCCTGATCGACCTGCAGGAGCTGGG | |
| | CAAGTACGAGCAGTACATCAAGTGGCCCTGGTACATCTGGCTGGGCTT | |
| | CATCGCCGGCCTGATCGCCATCGTGATGGTGACCATCATGCTGTGCTG | |
| | CATGACCAGCTGCTGCAGCTGCCTGAAGGGCTGCTGCAGCTGCGGCA | |
| | GCTGCTGCAAGTTCGACGAGGACGACAGCGAGCCCGTGCTGAAGGGC | |
| | GTGAAGCTGCACTACACCGGAAGCGGAGCCACGAACTTCTCTCTGTTA | |
| | AAGCAAGCAGGAGATGTTGAAGAAAACCCCGGGCCTGCCGAGAACGT | |
| | GACCGGCCTGTTCAAGGACTGCAGCAAGGTGATCACCGGCCTGCACC | |
| | CCACCCAGGCCCCCACCCACCTGAGCGTGGACACCAAGTTCAAGACC | |
| | GAGGGCCTGTGCGTGGACATCCCCGGCATCCCCAAGGACATGACCTA | |
| | CAGGAGGCTGATCAGCATGATGGGCTTCAAGATGAACTACCAGGTGAA | |
| | CGGCTACCCCAACATGTTCATCACCAGGGAGGAGGCCATCAGGCACGT | |
| | GAGGGCCTGGATCGGCTTCGACGTGGAGGGCTGCCACGCCACCAGGG | |
| | AGGCCGTGGGCACCAACCTGCCCCTGCAGCTGGGCTTCAGCACCGGC | |
| | GTGAACCTGGTGGCCGTGCCCACCGGCTACGTGGACACCCCCAACAA | |
| | CACCGACTTCAGCAGGGTGAGCGCCAAGCCCCCCCCCGGCGACCAGT | |
| | TCAAGCACCTGATCCCCCTGATGTACAAGGGCCTGCCCTGGAACGTGG | |
| | TGAGGATCAAGATCGTGCAGATGCTGAGCGACACCCTGAAGAACCTGA | |
| | GCGACAGGGTGGTGTTCGTGCTGTGGGCCCACGGCTTCGAGCTGACC | |
| | AGCATGAAGTACTTCGTGAAGATCGGCCCCGAGAGGACCTGCTGCCTG | |
| | TGCGACAGGAGGGCCACCTGCTTCAGCACCGCCAGCGACACCTACGC | |
| | CTGCTGGCACCACAGCATCGGCTTCGACTACGTGTACAACCCCTTCAT | |
| | GATCGACGTGCAGCAGTGGGGCTTCACCGGCAACCTGCAGAGCAACC | |
| | ACGACCTGTACTGCCAGGTGCACGGCAACGCCCACGTGGCCAGCTGC | |
| | GACGCCATCATGACCAGGTGCCTGGCCGTGCACGAGTGCTTCGTGAAG | |
| | AGGGTGGACTGGACCATCGAGTACCCCATCATCGGCGACGAGCTGAA | |
| | GATCAACGCCGCCTGCAGGAAGGTGCAGCACATGGTGGTGAAGGCCG | |
| | CCCTGCTGGCCGACAAGTTCCCCGTGCTGCACGACATCGGCAACCCCA | |
| | AGGCCATCAAGTGCGTGCCCCAGGCCGACGTGGAGTGGAAGTTCTAC | |
| | GACGCCCAGCCCTGCAGCGACAAGGCCTACAAGATCGAGGAGCTGTT | |
| | CTACAGCTACGCCACCCACAGCGACAAGTTCACCGACGGCGTGTGCCT | |
| | GTTCTGGAACTGCAACGTGGACAGGTACCCCGCCAACAGCATCGTGTG | |
| | CAGGTTCGACACCAGGGTGCTGAGCAACCTGAACCTGCCCGGCTGCG | |
| | ACGGCGGCAGCCTGTACGTGAACAAGCACGCCTTCCACACCCCCGCCT | |
| | TCGACAAGAGCGCCTTCGTGAACCTGAAGCAGCTGCCCTTCTTCTACTA | |
| | CAGCGACAGCCCCTGCGAGAGCCACGGCAAGCAGGTGGTGAGCGACA | |
| | TCGACTACGTGCCCCTGAAGAGCGCCACCTGCATCACCAGGTGCAACC | |
| | TGGGCGGCGCCGTGTGCAGGCACCACGCCAACGAGTACAGGCTGTAC | |
| | CTGGACGCCTACAACATGATGATCAGCGCCGGCTTCAGCCTGTGGGTG | |
| | TACAAGCAGTTCGACACCTACAACCTGTGGAACACCTTCACCAGGCTG | |
| | CAGGGAAGCGGAGAGGGCAGGGGAAGTCTTCTAACATGCGGGGACGT | |
| | GGAGGAAAATCCCGGCCCCAGCCTGGAGAACGTGGCCTTCAACGTGG | |
| | TGAACAAGGGCCACTTCGACGGCCAGCAGGGCGAGGTGCCCGTGAGC | |
| | ATCATCAACAACACCGTGTACACCAAGGTGGACGGCGTGGACGTGGAG | |
| | CTGTTCGAGAACAAGACCACCCTGCCCGTGAACGTGGCCTTCGAGCTG | |
| | TGGGCCAAGAGGAACATCAAGCCCGTGCCCGAGGTGAAGATCCTGAAC | |
| | AACCTGGGCGTGGACATCGCCGCCAACACCGTGATCTGGGACTACAAG | |
| | AGGGACGCCCCCGCCCACATCAGCACCATCGGCGTGTGCAGCATGAC | |
| | CGACATCGCCAAGAAGCCCACCGAGACCATCTGCGCCCCCCTGACCGT | |
| | GTTCTTCGACGGCAGGGTGGACGGCCAGGTGGACCTGTTCAGGAACG | |
| | CCAGGAACGGCGTGCTGATCACCGAGGGCAGCGTGAAGGGCCTGCAG | |
| | CCCAGCGTGGGCCCCAAGCAGGCCAGCCTGAACGGCGTGACCCTGAT | |
| | CGGCGAGGCCGTGAAGACCCAGTTCAACTACTACAAGAAGGTGGACG | |
| | GCGTGGTGCAGCAGCTGCCCGAGACCTACTTCACCCAGAGCAGGAAC | |
| | CTGCAGGAGTTCAAGCCCAGGAGCCAGATGGAGATCGACTTCCTGGAG | |
| | CTGGCCATGGACGAGTTCATCGAGAGGTACAAGCTGGAGGGCTACGC | |
| | CTTCGAGCACATCGTGTACGGCGACTTCAGCCACAGCCAGCTGGGCG | |
| | GCCTGCACCTGCTGATCGGCCTGGCCAAGAGGTTCAAGGAGAGCCCC | |
| | TTCGAGCTGGAGGACTTCATCCCCATGGACAGCACCGTGAAGAACTAC | |
| | TTCATCACCGACGCCCAGACCGGCAGCAGCAAGTGCGTGTGCAGCGT | |
| | GATCGACCTGCTGCTGGACGACTTCGTGGAGATCATCAAGAGCCAGGA | |
| | CCTGAGCGTGGTGAGCAAGGTGGTGAAGGTGACCATCGACTACACCGA | |
| | GATCAGCTTCATGCTGTGGTGCAAGGACGGCCACGTGGAGACCTTCTA | |
| | CCCCAAGCTGCAGTGATGA | |
| 30 | ATGTTCGTGTTCCTGGTGCTGCTGCCCCTGGTGAGCAGCCAGTGCGTG | 315 |
| Pan-CoV | AACCTGACCACCAGGACCCAGCTGCCCCCCGCCTACACCAACAGCTTC | |
| mRNA Spike- | ACCAGGGGCGTGTACTACCCCGACAAGGTGTTCAGGAGCAGCGTGCT | |
| NSP16 | GCACAGCACCCAGGACCTGTTCCTGCCCTTCTTCAGCAACGTGACCTG | |
| | GTTCCACGCCATCCACGTGAGCGGCACCAACGGCACCAAGAGGTTCGA | |
| | CAACCCCGTGCTGCCCTTCAACGACGGCGTGTACTTCGCCAGCACCGA | |
| | GAAGAGCAACATCATCAGGGGCTGGATCTTCGGCACCACCCTGGACAG | |
| | CAAGACCCAGAGCCTGCTGATCGTGAACAACGCCACCAACGTGGTGAT | |
| | CAAGGTGTGCGAGTTCCAGTTCTGCAACGACCCCTTCCTGGGCGTGTA | |
| | CTACCACAAGAACAACAAGAGCTGGATGGAGAGCGAGTTCAGGGTGTA | |
| | CAGCAGCGCCAACAACTGCACCTTCGAGTACGTGAGCCAGCCCTTCCT | |
| | GATGGACCTGGAGGGCAAGCAGGGCAACTTCAAGAACCTGAGGGAGT | |
| | TCGTGTTCAAGAACATCGACGGCTACTTCAAGATCTACAGCAAGCACAC | |
| | CCCCATCAACCTGGTGAGGGACCTGCCCCAGGGCTTCAGCGCCCTGG | |
| | AGCCCCTGGTGGACCTGCCCATCGGCATCAACATCACCAGGTTCCAGA | |
| | CCCTGCTGGCCCTGCACAGGAGCTACCTGACCCCCGGCGACAGCAGC | |
| | AGCGGCTGGACCGCCGGCGCCGCCGCCTACTACGTGGGCTACCTGCA | |
| | GCCCAGGACCTTCCTGCTGAAGTACAACGAGAACGGCACCATCACCGA | |
| | CGCCGTGGACTGCGCCCTGGACCCCCTGAGCGAGACCAAGTGCACCC | |
| | TGAAGAGCTTCACCGTGGAGAAGGGCATCTACCAGACCAGCAACTTCA | |
| | GGGTGCAGCCCACCGAGAGCATCGTGAGGTTCCCCAACATCACCAACC | |
| | TGTGCCCCTTCGGCGAGGTGTTCAACGCCACCAGGTTCGCCAGCGTGT | |
| | ACGCCTGGAACAGGAAGAGGATCAGCAACTGCGTGGCCGACTACAGC | |
| | GTGCTGTACAACAGCGCCAGCTTCAGCACCTTCAAGTGCTACGGCGTG | |
| | AGCCCCACCAAGCTGAACGACCTGTGCTTCACCAACGTGTACGCCGAC | |
| | AGCTTCGTGATCAGGGGCGACGAGGTGAGGCAGATCGCCCCCGGCCA | |
| | GACCGGCAAGATCGCCGACTACAACTACAAGCTGCCCGACGACTTCAC | |
| | CGGCTGCGTGATCGCCTGGAACAGCAACAACCTGGACAGCAAGGTGG | |
| | GCGGCAACTACAACTACCTGTACAGGCTGTTCAGGAAGAGCAACCTGA | |
| | AGCCCTTCGAGAGGGACATCAGCACCGAGATCTACCAGGCCGGCAGC | |
| | ACCCCCTGCAACGGCGTGGAGGGCTTCAACTGCTACTTCCCCCTGCAG | |
| | AGCTACGGCTTCCAGCCCACCAACGGCGTGGGCTACCAGCCCTACAG | |
| | GGTGGTGGTGCTGAGCTTCGAGCTGCTGCACGCCCCCGCCACCGTGT | |
| | GCGGCCCCAAGAAGAGCACCAACCTGGTGAAGAACAAGTGCGTGAACT | |
| | TCAACTTCAACGGCCTGACCGGCACCGGCGTGCTGACCGAGAGCAACA | |
| | AGAAGTTCCTGCCCTTCCAGCAGTTCGGCAGGGACATCGCCGACACCA | |
| | CCGACGCCGTGAGGGACCCCCAGACCCTGGAGATCCTGGACATCACC | |
| | CCCTGCAGCTTCGGCGGCGTGAGCGTGATCACCCCCGGCACCAACAC | |
| | CAGCAACCAGGTGGCCGTGCTGTACCAGGACGTGAACTGCACCGAGG | |
| | TGCCCGTGGCCATCCACGCCGACCAGCTGACCCCCACCTGGAGGGTG | |
| | TACAGCACCGGCAGCAACGTGTTCCAGACCAGGGCCGGCTGCCTGAT | |
| | CGGCGCCGAGCACGTGAACAACAGCTACGAGTGCGACATCCCCATCG | |
| | GCGCCGGCATCTGCGCCAGCTACCAGACCCAGACCAACAGCCCCAGG | |
| | AGGGCCAGGAGCGTGGCCAGCCAGAGCATCATCGCCTACACCATGAG | |
| | CCTGGGCGCCGAGAACAGCGTGGCCTACAGCAACAACAGCATCGCCA | |
| | TCCCCACCAACTTCACCATCAGCGTGACCACCGAGATCCTGCCCGTGA | |
| | GCATGACCAAGACCAGCGTGGACTGCACCATGTACATCTGCGGCGACA | |
| | GCACCGAGTGCAGCAACCTGCTGCTGCAGTACGGCAGCTTCTGCACCC | |
| | AGCTGAACAGGGCCCTGACCGGCATCGCCGTGGAGCAGGACAAGAAC | |
| | ACCCAGGAGGTGTTCGCCCAGGTGAAGCAGATCTACAAGACCCCCCCC | |
| | ATCAAGGACTTCGGCGGCTTCAACTTCAGCCAGATCCTGCCCGACCCC | |
| | AGCAAGCCCAGCAAGAGGAGCTTCATCGAGGACCTGCTGTTCAACAAG | |
| | GTGACCCTGGCCGACGCCGGCTTCATCAAGCAGTACGGCGACTGCCT | |
| | GGGCGACATCGCCGCCAGGGACCTGATCTGCGCCCAGAAGTTCAACG | |
| | GCCTGACCGTGCTGCCCCCCCTGCTGACCGACGAGATGATCGCCCAG | |
| | TACACCAGCGCCCTGCTGGCCGGCACCATCACCAGCGGCTGGACCTT | |
| | CGGCGCCGGCGCCGCCCTGCAGATCCCCTTCGCCATGCAGATGGCCT | |
| | ACAGGTTCAACGGCATCGGCGTGACCCAGAACGTGCTGTACGAGAACC | |
| | AGAAGCTGATCGCCAACCAGTTCAACAGCGCCATCGGCAAGATCCAGG | |
| | ACAGCCTGAGCAGCACCGCCAGCGCCCTGGGCAAGCTGCAGGACGTG | |
| | GTGAACCAGAACGCCCAGGCCCTGAACACCCTGGTGAAGCAGCTGAG | |
| | CAGCAACTTCGGCGCCATCAGCAGCGTGCTGAACGACATCCTGAGCAG | |
| | GCTGGACCCCCCCGAGGCCGAGGTGCAGATCGACAGGCTGATCACCG | |
| | GCAGGCTGCAGAGCCTGCAGACCTACGTGACCCAGCAGCTGATCAGG | |
| | GCCGCCGAGATCAGGGCCAGCGCCAACCTGGCCGCCACCAAGATGAG | |
| | CGAGTGCGTGCTGGGCCAGAGCAAGAGGGTGGACTTCTGCGGCAAGG | |
| | GCTACCACCTGATGAGCTTCCCCCAGAGCGCCCCCCACGGCGTGGTG | |
| | TTCCTGCACGTGACCTACGTGCCCGCCCAGGAGAAGAACTTCACCACC | |
| | GCCCCCGCCATCTGCCACGACGGCAAGGCCCACTTCCCCAGGGAGGG | |
| | CGTGTTCGTGAGCAACGGCACCCACTGGTTCGTGACCCAGAGGAACTT | |
| | CTACGAGCCCCAGATCATCACCACCGACAACACCTTCGTGAGCGGCAA | |
| | CTGCGACGTGGTGATCGGCATCGTGAACAACACCGTGTACGACCCCCT | |
| | GCAGCCCGAGCTGGACAGCTTCAAGGAGGAGCTGGACAAGTACTTCAA | |
| | GAACCACACCAGCCCCGACGTGGACCTGGGCGACATCAGCGGCATCA | |
| | ACGCCAGCGTGGTGAACATCCAGAAGGAGATCGACAGGCTGAACGAG | |
| | GTGGCCAAGAACCTGAACGAGAGCCTGATCGACCTGCAGGAGCTGGG | |
| | CAAGTACGAGCAGTACATCAAGTGGCCCTGGTACATCTGGCTGGGCTT | |
| | CATCGCCGGCCTGATCGCCATCGTGATGGTGACCATCATGCTGTGCTG | |
| | CATGACCAGCTGCTGCAGCTGCCTGAAGGGCTGCTGCAGCTGCGGCA | |
| | GCTGCTGCAAGTTCGACGAGGACGACAGCGAGCCCGTGCTGAAGGGC | |
| | GTGAAGCTGCACTACACCGGAAGCGGAGCCACGAACTTCTCTCTGTTA | |
| | AAGCAAGCAGGAGATGTTGAAGAAAACCCCGGGCCTAGCAGCCAGGC | |
| | CTGGCAGCCCGGCGTGGCCATGCCCAACCTGTACAAGATGCAGAGGA | |
| | TGCTGCTGGAGAAGTGCGACCTGCAGAACTACGGCGACAGCGCCACC | |
| | CTGCCCAAGGGCATCATGATGAACGTGGCCAAGTACACCCAGCTGTGC | |
| | CAGTACCTGAACACCCTGACCCTGGCCGTGCCCTACAACATGAGGGTG | |
| | ATCCACTTCGGCGCCGGCAGCGACAAGGGCGTGGCCCCCGGCACCGC | |
| | CGTGCTGAGGCAGTGGCTGCCCACCGGCACCCTGCTGGTGGACAGCG | |
| | ACCTGAACGACTTCGTGAGCGACGCCGACAGCACCCTGATCGGCGACT | |
| | GCGCCACCGTGCACACCGCCAACAAGTGGGACCTGATCATCAGCGACA | |
| | TGTACGACCCCAAGACCAAGAACGTGACCAAGGAGAACGACAGCAAGG | |
| | AGGGCTTCTTCACCTACATCTGCGGCTTCATCCAGCAGAAGCTGGCCC | |
| | TGGGCGGCAGCGTGGCCATCAAGATCACCGAGCACAGCTGGAACGCC | |
| | GACCTGTACAAGCTGATGGGCCACTTCGCCTGGTGGACCGCCTTCGTG | |
| | ACCAACGTGAACGCCAGCAGCAGCGAGGCCTTCCTGATCGGCTGCAAC | |
| | TACCTGGGCAAGCCCAGGGAGCAGATCGACGGCTACGTGATGCACGC | |
| | CAACTACATCTTCTGGAGGAACACCAACCCCATCCAGCTGAGCAGCTA | |
| | CAGCCTGTTCGACATGAGCAAGTTCCCCCTGAAGCTGAGGGGCACCGC | |
| | CGTGATGAGCCTGAAGGAGGGCCAGATCAACGACATGATCCTGAGCCT | |
| | GCTGAGCAAGGGCAGGCTGATCATCAGGGAGAACAACAGGGTGGTGA | |
| | TCAGCAGCGACGTGCTGGTGAACAACTGATGA | |
| 31 | ATGTTCGTGTTCCTGGTGCTGCTGCCCCTGGTGAGCAGCCAGTGCGTG | 316 |
| Pan-CoV | AACCTGACCACCAGGACCCAGCTGCCCCCCGCCTACACCAACAGCTTC | |
| mRNA | ACCAGGGGCGTGTACTACCCCGACAAGGTGTTCAGGAGCAGCGTGCT | |
| HexaPro- | GCACAGCACCCAGGACCTGTTCCTGCCCTTCTTCAGCAACGTGACCTG | |
| NSP16 | GTTCCACGCCATCCACGTGAGCGGCACCAACGGCACCAAGAGGTTCGA | |
| | CAACCCCGTGCTGCCCTTCAACGACGGCGTGTACTTCGCCAGCACCGA | |
| | GAAGAGCAACATCATCAGGGGCTGGATCTTCGGCACCACCCTGGACAG | |
| | CAAGACCCAGAGCCTGCTGATCGTGAACAACGCCACCAACGTGGTGAT | |
| | CAAGGTGTGCGAGTTCCAGTTCTGCAACGACCCCTTCCTGGGCGTGTA | |
| | CTACCACAAGAACAACAAGAGCTGGATGGAGAGCGAGTTCAGGGTGTA | |
| | CAGCAGCGCCAACAACTGCACCTTCGAGTACGTGAGCCAGCCCTTCCT | |
| | GATGGACCTGGAGGGCAAGCAGGGCAACTTCAAGAACCTGAGGGAGT | |
| | TCGTGTTCAAGAACATCGACGGCTACTTCAAGATCTACAGCAAGCACAC | |
| | CCCCATCAACCTGGTGAGGGACCTGCCCCAGGGCTTCAGCGCCCTGG | |
| | AGCCCCTGGTGGACCTGCCCATCGGCATCAACATCACCAGGTTCCAGA | |
| | CCCTGCTGGCCCTGCACAGGAGCTACCTGACCCCCGGCGACAGCAGC | |
| | AGCGGCTGGACCGCCGGCGCCGCCGCCTACTACGTGGGCTACCTGCA | |
| | GCCCAGGACCTTCCTGCTGAAGTACAACGAGAACGGCACCATCACCGA | |
| | CGCCGTGGACTGCGCCCTGGACCCCCTGAGCGAGACCAAGTGCACCC | |
| | TGAAGAGCTTCACCGTGGAGAAGGGCATCTACCAGACCAGCAACTTCA | |
| | GGGTGCAGCCCACCGAGAGCATCGTGAGGTTCCCCAACATCACCAACC | |
| | TGTGCCCCTTCGGCGAGGTGTTCAACGCCACCAGGTTCGCCAGCGTGT | |
| | ACGCCTGGAACAGGAAGAGGATCAGCAACTGCGTGGCCGACTACAGC | |
| | GTGCTGTACAACAGCGCCAGCTTCAGCACCTTCAAGTGCTACGGCGTG | |
| | AGCCCCACCAAGCTGAACGACCTGTGCTTCACCAACGTGTACGCCGAC | |
| | AGCTTCGTGATCAGGGGCGACGAGGTGAGGCAGATCGCCCCCGGCCA | |
| | GACCGGCAAGATCGCCGACTACAACTACAAGCTGCCCGACGACTTCAC | |
| | CGGCTGCGTGATCGCCTGGAACAGCAACAACCTGGACAGCAAGGTGG | |
| | GCGGCAACTACAACTACCTGTACAGGCTGTTCAGGAAGAGCAACCTGA | |
| | AGCCCTTCGAGAGGGACATCAGCACCGAGATCTACCAGGCCGGCAGC | |
| | ACCCCCTGCAACGGCGTGGAGGGCTTCAACTGCTACTTCCCCCTGCAG | |
| | AGCTACGGCTTCCAGCCCACCAACGGCGTGGGCTACCAGCCCTACAG | |
| | GGTGGTGGTGCTGAGCTTCGAGCTGCTGCACGCCCCCGCCACCGTGT | |
| | GCGGCCCCAAGAAGAGCACCAACCTGGTGAAGAACAAGTGCGTGAACT | |
| | TCAACTTCAACGGCCTGACCGGCACCGGCGTGCTGACCGAGAGCAACA | |
| | AGAAGTTCCTGCCCTTCCAGCAGTTCGGCAGGGACATCGCCGACACCA | |
| | CCGACGCCGTGAGGGACCCCCAGACCCTGGAGATCCTGGACATCACC | |
| | CCCTGCAGCTTCGGCGGCGTGAGCGTGATCACCCCCGGCACCAACAC | |
| | CAGCAACCAGGTGGCCGTGCTGTACCAGGACGTGAACTGCACCGAGG | |
| | TGCCCGTGGCCATCCACGCCGACCAGCTGACCCCCACCTGGAGGGTG | |
| | TACAGCACCGGCAGCAACGTGTTCCAGACCAGGGCCGGCTGCCTGAT | |
| | CGGCGCCGAGCACGTGAACAACAGCTACGAGTGCGACATCCCCATCG | |
| | GCGCCGGCATCTGCGCCAGCTACCAGACCCAGACCAACAGCCCCGGC | |
| | AGCGCCAGCAGCGTGGCCAGCCAGAGCATCATCGCCTACACCATGAG | |
| | CCTGGGCGCCGAGAACAGCGTGGCCTACAGCAACAACAGCATCGCCA | |
| | TCCCCACCAACTTCACCATCAGCGTGACCACCGAGATCCTGCCCGTGA | |
| | GCATGACCAAGACCAGCGTGGACTGCACCATGTACATCTGCGGCGACA | |
| | GCACCGAGTGCAGCAACCTGCTGCTGCAGTACGGCAGCTTCTGCACCC | |
| | AGCTGAACAGGGCCCTGACCGGCATCGCCGTGGAGCAGGACAAGAAC | |
| | ACCCAGGAGGTGTTCGCCCAGGTGAAGCAGATCTACAAGACCCCCCCC | |
| | ATCAAGGACTTCGGCGGCTTCAACTTCAGCCAGATCCTGCCCGACCCC | |
| | AGCAAGCCCAGCAAGAGGAGCCCCATCGAGGACCTGCTGTTCAACAAG | |
| | GTGACCCTGGCCGACGCCGGCTTCATCAAGCAGTACGGCGACTGCCT | |
| | GGGCGACATCGCCGCCAGGGACCTGATCTGCGCCCAGAAGTTCAACG | |
| | GCCTGACCGTGCTGCCCCCCCTGCTGACCGACGAGATGATCGCCCAG | |
| | TACACCAGCGCCCTGCTGGCCGGCACCATCACCAGCGGCTGGACCTT | |
| | CGGCGCCGGCCCCGCCCTGCAGATCCCCTTCCCCATGCAGATGGCCT | |
| | ACAGGTTCAACGGCATCGGCGTGACCCAGAACGTGCTGTACGAGAACC | |
| | AGAAGCTGATCGCCAACCAGTTCAACAGCGCCATCGGCAAGATCCAGG | |
| | ACAGCCTGAGCAGCACCCCCAGCGCCCTGGGCAAGCTGCAGGACGTG | |
| | GTGAACCAGAACGCCCAGGCCCTGAACACCCTGGTGAAGCAGCTGAG | |
| | CAGCAACTTCGGCGCCATCAGCAGCGTGCTGAACGACATCCTGAGCAG | |
| | GCTGGACCCCCCCGAGGCCGAGGTGCAGATCGACAGGCTGATCACCG | |
| | GCAGGCTGCAGAGCCTGCAGACCTACGTGACCCAGCAGCTGATCAGG | |
| | GCCGCCGAGATCAGGGCCAGCGCCAACCTGGCCGCCACCAAGATGAG | |
| | CGAGTGCGTGCTGGGCCAGAGCAAGAGGGTGGACTTCTGCGGCAAGG | |
| | GCTACCACCTGATGAGCTTCCCCCAGAGCGCCCCCCACGGCGTGGTG | |
| | TTCCTGCACGTGACCTACGTGCCCGCCCAGGAGAAGAACTTCACCACC | |
| | GCCCCCGCCATCTGCCACGACGGCAAGGCCCACTTCCCCAGGGAGGG | |
| | CGTGTTCGTGAGCAACGGCACCCACTGGTTCGTGACCCAGAGGAACTT | |
| | CTACGAGCCCCAGATCATCACCACCGACAACACCTTCGTGAGCGGCAA | |
| | CTGCGACGTGGTGATCGGCATCGTGAACAACACCGTGTACGACCCCCT | |
| | GCAGCCCGAGCTGGACAGCTTCAAGGAGGAGCTGGACAAGTACTTCAA | |
| | GAACCACACCAGCCCCGACGTGGACCTGGGCGACATCAGCGGCATCA | |
| | ACGCCAGCGTGGTGAACATCCAGAAGGAGATCGACAGGCTGAACGAG | |
| | GTGGCCAAGAACCTGAACGAGAGCCTGATCGACCTGCAGGAGCTGGG | |
| | CAAGTACGAGCAGTACATCAAGTGGCCCTGGTACATCTGGCTGGGCTT | |
| | CATCGCCGGCCTGATCGCCATCGTGATGGTGACCATCATGCTGTGCTG | |
| | CATGACCAGCTGCTGCAGCTGCCTGAAGGGCTGCTGCAGCTGCGGCA | |
| | GCTGCTGCAAGTTCGACGAGGACGACAGCGAGCCCGTGCTGAAGGGC | |
| | GTGAAGCTGCACTACACCGGAAGCGGAGCCACGAACTTCTCTCTGTTA | |
| | AAGCAAGCAGGAGATGTTGAAGAAAACCCCGGGCCTAGCAGCCAGGC | |
| | CTGGCAGCCCGGCGTGGCCATGCCCAACCTGTACAAGATGCAGAGGA | |
| | TGCTGCTGGAGAAGTGCGACCTGCAGAACTACGGCGACAGCGCCACC | |
| | CTGCCCAAGGGCATCATGATGAACGTGGCCAAGTACACCCAGCTGTGC | |
| | CAGTACCTGAACACCCTGACCCTGGCCGTGCCCTACAACATGAGGGTG | |
| | ATCCACTTCGGCGCCGGCAGCGACAAGGGCGTGGCCCCCGGCACCGC | |
| | CGTGCTGAGGCAGTGGCTGCCCACCGGCACCCTGCTGGTGGACAGCG | |
| | ACCTGAACGACTTCGTGAGCGACGCCGACAGCACCCTGATCGGCGACT | |
| | GCGCCACCGTGCACACCGCCAACAAGTGGGACCTGATCATCAGCGACA | |
| | TGTACGACCCCAAGACCAAGAACGTGACCAAGGAGAACGACAGCAAGG | |
| | AGGGCTTCTTCACCTACATCTGCGGCTTCATCCAGCAGAAGCTGGCCC | |
| | TGGGCGGCAGCGTGGCCATCAAGATCACCGAGCACAGCTGGAACGCC | |
| | GACCTGTACAAGCTGATGGGCCACTTCGCCTGGTGGACCGCCTTCGTG | |
| | ACCAACGTGAACGCCAGCAGCAGCGAGGCCTTCCTGATCGGCTGCAAC | |
| | TACCTGGGCAAGCCCAGGGAGCAGATCGACGGCTACGTGATGCACGC | |
| | CAACTACATCTTCTGGAGGAACACCAACCCCATCCAGCTGAGCAGCTA | |
| | CAGCCTGTTCGACATGAGCAAGTTCCCCCTGAAGCTGAGGGGCACCGC | |
| | CGTGATGAGCCTGAAGGAGGGCCAGATCAACGACATGATCCTGAGCCT | |
| | GCTGAGCAAGGGCAGGCTGATCATCAGGGAGAACAACAGGGTGGTGA | |
| | TCAGCAGCGACGTGCTGGTGAACAACTGATGA | |
| 32 | ATGTTCGTGTTCCTGGTGCTGCTGCCCCTGGTGAGCAGCCAGTGCGTG | 317 |
| Pan-CoV | AACCTGACCACCAGGACCCAGCTGCCCCCCGCCTACACCAACAGCTTC | |
| mRNA Spike- | ACCAGGGGCGTGTACTACCCCGACAAGGTGTTCAGGAGCAGCGTGCT | |
| ORF3a | GCACAGCACCCAGGACCTGTTCCTGCCCTTCTTCAGCAACGTGACCTG | |
| | GTTCCACGCCATCCACGTGAGCGGCACCAACGGCACCAAGAGGTTCGA | |
| | CAACCCCGTGCTGCCCTTCAACGACGGCGTGTACTTCGCCAGCACCGA | |
| | GAAGAGCAACATCATCAGGGGCTGGATCTTCGGCACCACCCTGGACAG | |
| | CAAGACCCAGAGCCTGCTGATCGTGAACAACGCCACCAACGTGGTGAT | |
| | CAAGGTGTGCGAGTTCCAGTTCTGCAACGACCCCTTCCTGGGCGTGTA | |
| | CTACCACAAGAACAACAAGAGCTGGATGGAGAGCGAGTTCAGGGTGTA | |
| | CAGCAGCGCCAACAACTGCACCTTCGAGTACGTGAGCCAGCCCTTCCT | |
| | GATGGACCTGGAGGGCAAGCAGGGCAACTTCAAGAACCTGAGGGAGT | |
| | TCGTGTTCAAGAACATCGACGGCTACTTCAAGATCTACAGCAAGCACAC | |
| | CCCCATCAACCTGGTGAGGGACCTGCCCCAGGGCTTCAGCGCCCTGG | |
| | AGCCCCTGGTGGACCTGCCCATCGGCATCAACATCACCAGGTTCCAGA | |
| | CCCTGCTGGCCCTGCACAGGAGCTACCTGACCCCCGGCGACAGCAGC | |
| | AGCGGCTGGACCGCCGGCGCCGCCGCCTACTACGTGGGCTACCTGCA | |
| | GCCCAGGACCTTCCTGCTGAAGTACAACGAGAACGGCACCATCACCGA | |
| | CGCCGTGGACTGCGCCCTGGACCCCCTGAGCGAGACCAAGTGCACCC | |
| | TGAAGAGCTTCACCGTGGAGAAGGGCATCTACCAGACCAGCAACTTCA | |
| | GGGTGCAGCCCACCGAGAGCATCGTGAGGTTCCCCAACATCACCAACC | |
| | TGTGCCCCTTCGGCGAGGTGTTCAACGCCACCAGGTTCGCCAGCGTGT | |
| | ACGCCTGGAACAGGAAGAGGATCAGCAACTGCGTGGCCGACTACAGC | |
| | GTGCTGTACAACAGCGCCAGCTTCAGCACCTTCAAGTGCTACGGCGTG | |
| | AGCCCCACCAAGCTGAACGACCTGTGCTTCACCAACGTGTACGCCGAC | |
| | AGCTTCGTGATCAGGGGCGACGAGGTGAGGCAGATCGCCCCCGGCCA | |
| | GACCGGCAAGATCGCCGACTACAACTACAAGCTGCCCGACGACTTCAC | |
| | CGGCTGCGTGATCGCCTGGAACAGCAACAACCTGGACAGCAAGGTGG | |
| | GCGGCAACTACAACTACCTGTACAGGCTGTTCAGGAAGAGCAACCTGA | |
| | AGCCCTTCGAGAGGGACATCAGCACCGAGATCTACCAGGCCGGCAGC | |
| | ACCCCCTGCAACGGCGTGGAGGGCTTCAACTGCTACTTCCCCCTGCAG | |
| | AGCTACGGCTTCCAGCCCACCAACGGCGTGGGCTACCAGCCCTACAG | |
| | GGTGGTGGTGCTGAGCTTCGAGCTGCTGCACGCCCCCGCCACCGTGT | |
| | GCGGCCCCAAGAAGAGCACCAACCTGGTGAAGAACAAGTGCGTGAACT | |
| | TCAACTTCAACGGCCTGACCGGCACCGGCGTGCTGACCGAGAGCAACA | |
| | AGAAGTTCCTGCCCTTCCAGCAGTTCGGCAGGGACATCGCCGACACCA | |
| | CCGACGCCGTGAGGGACCCCCAGACCCTGGAGATCCTGGACATCACC | |
| | CCCTGCAGCTTCGGCGGCGTGAGCGTGATCACCCCCGGCACCAACAC | |
| | CAGCAACCAGGTGGCCGTGCTGTACCAGGACGTGAACTGCACCGAGG | |
| | TGCCCGTGGCCATCCACGCCGACCAGCTGACCCCCACCTGGAGGGTG | |
| | TACAGCACCGGCAGCAACGTGTTCCAGACCAGGGCCGGCTGCCTGAT | |
| | CGGCGCCGAGCACGTGAACAACAGCTACGAGTGCGACATCCCCATCG | |
| | GCGCCGGCATCTGCGCCAGCTACCAGACCCAGACCAACAGCCCCAGG | |
| | AGGGCCAGGAGCGTGGCCAGCCAGAGCATCATCGCCTACACCATGAG | |
| | CCTGGGCGCCGAGAACAGCGTGGCCTACAGCAACAACAGCATCGCCA | |
| | TCCCCACCAACTTCACCATCAGCGTGACCACCGAGATCCTGCCCGTGA | |
| | GCATGACCAAGACCAGCGTGGACTGCACCATGTACATCTGCGGCGACA | |
| | GCACCGAGTGCAGCAACCTGCTGCTGCAGTACGGCAGCTTCTGCACCC | |
| | AGCTGAACAGGGCCCTGACCGGCATCGCCGTGGAGCAGGACAAGAAC | |
| | ACCCAGGAGGTGTTCGCCCAGGTGAAGCAGATCTACAAGACCCCCCCC | |
| | ATCAAGGACTTCGGCGGCTTCAACTTCAGCCAGATCCTGCCCGACCCC | |
| | AGCAAGCCCAGCAAGAGGAGCTTCATCGAGGACCTGCTGTTCAACAAG | |
| | GTGACCCTGGCCGACGCCGGCTTCATCAAGCAGTACGGCGACTGCCT | |
| | GGGCGACATCGCCGCCAGGGACCTGATCTGCGCCCAGAAGTTCAACG | |
| | GCCTGACCGTGCTGCCCCCCCTGCTGACCGACGAGATGATCGCCCAG | |
| | TACACCAGCGCCCTGCTGGCCGGCACCATCACCAGCGGCTGGACCTT | |
| | CGGCGCCGGCGCCGCCCTGCAGATCCCCTTCGCCATGCAGATGGCCT | |
| | ACAGGTTCAACGGCATCGGCGTGACCCAGAACGTGCTGTACGAGAACC | |
| | AGAAGCTGATCGCCAACCAGTTCAACAGCGCCATCGGCAAGATCCAGG | |
| | ACAGCCTGAGCAGCACCGCCAGCGCCCTGGGCAAGCTGCAGGACGTG | |
| | GTGAACCAGAACGCCCAGGCCCTGAACACCCTGGTGAAGCAGCTGAG | |
| | CAGCAACTTCGGCGCCATCAGCAGCGTGCTGAACGACATCCTGAGCAG | |
| | GCTGGACCCCCCCGAGGCCGAGGTGCAGATCGACAGGCTGATCACCG | |
| | GCAGGCTGCAGAGCCTGCAGACCTACGTGACCCAGCAGCTGATCAGG | |
| | GCCGCCGAGATCAGGGCCAGCGCCAACCTGGCCGCCACCAAGATGAG | |
| | CGAGTGCGTGCTGGGCCAGAGCAAGAGGGTGGACTTCTGCGGCAAGG | |
| | GCTACCACCTGATGAGCTTCCCCCAGAGCGCCCCCCACGGCGTGGTG | |
| | TTCCTGCACGTGACCTACGTGCCCGCCCAGGAGAAGAACTTCACCACC | |
| | GCCCCCGCCATCTGCCACGACGGCAAGGCCCACTTCCCCAGGGAGGG | |
| | CGTGTTCGTGAGCAACGGCACCCACTGGTTCGTGACCCAGAGGAACTT | |
| | CTACGAGCCCCAGATCATCACCACCGACAACACCTTCGTGAGCGGCAA | |
| | CTGCGACGTGGTGATCGGCATCGTGAACAACACCGTGTACGACCCCCT | |
| | GCAGCCCGAGCTGGACAGCTTCAAGGAGGAGCTGGACAAGTACTTCAA | |
| | GAACCACACCAGCCCCGACGTGGACCTGGGCGACATCAGCGGCATCA | |
| | ACGCCAGCGTGGTGAACATCCAGAAGGAGATCGACAGGCTGAACGAG | |
| | GTGGCCAAGAACCTGAACGAGAGCCTGATCGACCTGCAGGAGCTGGG | |
| | CAAGTACGAGCAGTACATCAAGTGGCCCTGGTACATCTGGCTGGGCTT | |
| | CATCGCCGGCCTGATCGCCATCGTGATGGTGACCATCATGCTGTGCTG | |
| | CATGACCAGCTGCTGCAGCTGCCTGAAGGGCTGCTGCAGCTGCGGCA | |
| | GCTGCTGCAAGTTCGACGAGGACGACAGCGAGCCCGTGCTGAAGGGC | |
| | GTGAAGCTGCACTACACCGGAAGCGGAGCCACGAACTTCTCTCTGTTA | |
| | AAGCAAGCAGGAGATGTTGAAGAAAACCCCGGGCCTATGGACCTGTTC | |
| | ATGAGGATCTTCACCATCGGCACCGTGACCCTGAAGCAGGGCGAGATC | |
| | AAGGACGCCACCCCCAGCGACTTCGTGAGGGCCACCGCCACCATCCC | |
| | CATCCAGGCCAGCCTGCCCTTCGGCTGGCTGATCGTGGGCGTGGCCC | |
| | TGCTGGCCGTGTTCCAGAGCGCCAGCAAGATCATCACCCTGAAGAAGA | |
| | GGTGGCAGCTGGCCCTGAGCAAGGGCGTGCACTTCGTGTGCAACCTG | |
| | CTGCTGCTGTTCGTGACCGTGTACAGCCACCTGCTGCTGGTGGCCGCC | |
| | GGCCTGGAGGCCCCCTTCCTGTACCTGTACGCCCTGGTGTACTTCCTG | |
| | CAGAGCATCAACTTCGTGAGGATCATCATGAGGCTGTGGCTGTGCTGG | |
| | AAGTGCAGGAGCAAGAACCCCCTGCTGTACGACGCCAACTACTTCCTG | |
| | TGCTGGCACACCAACTGCTACGACTACTGCATCCCCTACAACAGCGTG | |
| | ACCAGCAGCATCGTGATCACCAGCGGCGACGGCACCACCAGCCCCAT | |
| | CAGCGAGCACGACTACCAGATCGGCGGCTACACCGAGAAGTGGGAGA | |
| | GCGGCGTGAAGGACTGCGTGGTGCTGCACAGCTACTTCACCAGCGACT | |
| | ACTACCAGCTGTACAGCACCCAGCTGAGCACCGACACCGGCGTGGAG | |
| | CACGTGACCTTCTTCATCTACAACAAGATCGTGGACGAGCCCGAGGAG | |
| | CACGTGCAGATCCACACCATCGACGGCAGCAGCGGCGTGGTGAACCC | |
| | CGTGATGGAGCCCATCTACGACGAGCCCACCACCACCACCAGCGTGC | |
| | CCCTGTGATGA | |
| 33 | ATGTTCGTGTTCCTGGTGCTGCTGCCCCTGGTGAGCAGCCAGTGCGTG | 318 |
| Pan-CoV | AACCTGACCACCAGGACCCAGCTGCCCCCCGCCTACACCAACAGCTTC | |
| mRNA | ACCAGGGGCGTGTACTACCCCGACAAGGTGTTCAGGAGCAGCGTGCT | |
| HexaPro- | GCACAGCACCCAGGACCTGTTCCTGCCCTTCTTCAGCAACGTGACCTG | |
| ORF3a | GTTCCACGCCATCCACGTGAGCGGCACCAACGGCACCAAGAGGTTCGA | |
| | CAACCCCGTGCTGCCCTTCAACGACGGCGTGTACTTCGCCAGCACCGA | |
| | GAAGAGCAACATCATCAGGGGCTGGATCTTCGGCACCACCCTGGACAG | |
| | CAAGACCCAGAGCCTGCTGATCGTGAACAACGCCACCAACGTGGTGAT | |
| | CAAGGTGTGCGAGTTCCAGTTCTGCAACGACCCCTTCCTGGGCGTGTA | |
| | CTACCACAAGAACAACAAGAGCTGGATGGAGAGCGAGTTCAGGGTGTA | |
| | CAGCAGCGCCAACAACTGCACCTTCGAGTACGTGAGCCAGCCCTTCCT | |
| | GATGGACCTGGAGGGCAAGCAGGGCAACTTCAAGAACCTGAGGGAGT | |
| | TCGTGTTCAAGAACATCGACGGCTACTTCAAGATCTACAGCAAGCACAC | |
| | CCCCATCAACCTGGTGAGGGACCTGCCCCAGGGCTTCAGCGCCCTGG | |
| | AGCCCCTGGTGGACCTGCCCATCGGCATCAACATCACCAGGTTCCAGA | |
| | CCCTGCTGGCCCTGCACAGGAGCTACCTGACCCCCGGCGACAGCAGC | |
| | AGCGGCTGGACCGCCGGCGCCGCCGCCTACTACGTGGGCTACCTGCA | |
| | GCCCAGGACCTTCCTGCTGAAGTACAACGAGAACGGCACCATCACCGA | |
| | CGCCGTGGACTGCGCCCTGGACCCCCTGAGCGAGACCAAGTGCACCC | |
| | TGAAGAGCTTCACCGTGGAGAAGGGCATCTACCAGACCAGCAACTTCA | |
| | GGGTGCAGCCCACCGAGAGCATCGTGAGGTTCCCCAACATCACCAACC | |
| | TGTGCCCCTTCGGCGAGGTGTTCAACGCCACCAGGTTCGCCAGCGTGT | |
| | ACGCCTGGAACAGGAAGAGGATCAGCAACTGCGTGGCCGACTACAGC | |
| | GTGCTGTACAACAGCGCCAGCTTCAGCACCTTCAAGTGCTACGGCGTG | |
| | AGCCCCACCAAGCTGAACGACCTGTGCTTCACCAACGTGTACGCCGAC | |
| | AGCTTCGTGATCAGGGGCGACGAGGTGAGGCAGATCGCCCCCGGCCA | |
| | GACCGGCAAGATCGCCGACTACAACTACAAGCTGCCCGACGACTTCAC | |
| | CGGCTGCGTGATCGCCTGGAACAGCAACAACCTGGACAGCAAGGTGG | |
| | GCGGCAACTACAACTACCTGTACAGGCTGTTCAGGAAGAGCAACCTGA | |
| | AGCCCTTCGAGAGGGACATCAGCACCGAGATCTACCAGGCCGGCAGC | |
| | ACCCCCTGCAACGGCGTGGAGGGCTTCAACTGCTACTTCCCCCTGCAG | |
| | AGCTACGGCTTCCAGCCCACCAACGGCGTGGGCTACCAGCCCTACAG | |
| | GGTGGTGGTGCTGAGCTTCGAGCTGCTGCACGCCCCCGCCACCGTGT | |
| | GCGGCCCCAAGAAGAGCACCAACCTGGTGAAGAACAAGTGCGTGAACT | |
| | TCAACTTCAACGGCCTGACCGGCACCGGCGTGCTGACCGAGAGCAACA | |
| | AGAAGTTCCTGCCCTTCCAGCAGTTCGGCAGGGACATCGCCGACACCA | |
| | CCGACGCCGTGAGGGACCCCCAGACCCTGGAGATCCTGGACATCACC | |
| | CCCTGCAGCTTCGGCGGCGTGAGCGTGATCACCCCCGGCACCAACAC | |
| | CAGCAACCAGGTGGCCGTGCTGTACCAGGACGTGAACTGCACCGAGG | |
| | TGCCCGTGGCCATCCACGCCGACCAGCTGACCCCCACCTGGAGGGTG | |
| | TACAGCACCGGCAGCAACGTGTTCCAGACCAGGGCCGGCTGCCTGAT | |
| | CGGCGCCGAGCACGTGAACAACAGCTACGAGTGCGACATCCCCATCG | |
| | GCGCCGGCATCTGCGCCAGCTACCAGACCCAGACCAACAGCCCCGGC | |
| | AGCGCCAGCAGCGTGGCCAGCCAGAGCATCATCGCCTACACCATGAG | |
| | CCTGGGCGCCGAGAACAGCGTGGCCTACAGCAACAACAGCATCGCCA | |
| | TCCCCACCAACTTCACCATCAGCGTGACCACCGAGATCCTGCCCGTGA | |
| | GCATGACCAAGACCAGCGTGGACTGCACCATGTACATCTGCGGCGACA | |
| | GCACCGAGTGCAGCAACCTGCTGCTGCAGTACGGCAGCTTCTGCACCC | |
| | AGCTGAACAGGGCCCTGACCGGCATCGCCGTGGAGCAGGACAAGAAC | |
| | ACCCAGGAGGTGTTCGCCCAGGTGAAGCAGATCTACAAGACCCCCCCC | |
| | ATCAAGGACTTCGGCGGCTTCAACTTCAGCCAGATCCTGCCCGACCCC | |
| | AGCAAGCCCAGCAAGAGGAGCCCCATCGAGGACCTGCTGTTCAACAAG | |
| | GTGACCCTGGCCGACGCCGGCTTCATCAAGCAGTACGGCGACTGCCT | |
| | GGGCGACATCGCCGCCAGGGACCTGATCTGCGCCCAGAAGTTCAACG | |
| | GCCTGACCGTGCTGCCCCCCCTGCTGACCGACGAGATGATCGCCCAG | |
| | TACACCAGCGCCCTGCTGGCCGGCACCATCACCAGCGGCTGGACCTT | |
| | CGGCGCCGGCCCCGCCCTGCAGATCCCCTTCCCCATGCAGATGGCCT | |
| | ACAGGTTCAACGGCATCGGCGTGACCCAGAACGTGCTGTACGAGAACC | |
| | AGAAGCTGATCGCCAACCAGTTCAACAGCGCCATCGGCAAGATCCAGG | |
| | ACAGCCTGAGCAGCACCCCCAGCGCCCTGGGCAAGCTGCAGGACGTG | |
| | GTGAACCAGAACGCCCAGGCCCTGAACACCCTGGTGAAGCAGCTGAG | |
| | CAGCAACTTCGGCGCCATCAGCAGCGTGCTGAACGACATCCTGAGCAG | |
| | GCTGGACCCCCCCGAGGCCGAGGTGCAGATCGACAGGCTGATCACCG | |
| | GCAGGCTGCAGAGCCTGCAGACCTACGTGACCCAGCAGCTGATCAGG | |
| | GCCGCCGAGATCAGGGCCAGCGCCAACCTGGCCGCCACCAAGATGAG | |
| | CGAGTGCGTGCTGGGCCAGAGCAAGAGGGTGGACTTCTGCGGCAAGG | |
| | GCTACCACCTGATGAGCTTCCCCCAGAGCGCCCCCCACGGCGTGGTG | |
| | TTCCTGCACGTGACCTACGTGCCCGCCCAGGAGAAGAACTTCACCACC | |
| | GCCCCCGCCATCTGCCACGACGGCAAGGCCCACTTCCCCAGGGAGGG | |
| | CGTGTTCGTGAGCAACGGCACCCACTGGTTCGTGACCCAGAGGAACTT | |
| | CTACGAGCCCCAGATCATCACCACCGACAACACCTTCGTGAGCGGCAA | |
| | CTGCGACGTGGTGATCGGCATCGTGAACAACACCGTGTACGACCCCCT | |
| | GCAGCCCGAGCTGGACAGCTTCAAGGAGGAGCTGGACAAGTACTTCAA | |
| | GAACCACACCAGCCCCGACGTGGACCTGGGCGACATCAGCGGCATCA | |
| | ACGCCAGCGTGGTGAACATCCAGAAGGAGATCGACAGGCTGAACGAG | |
| | GTGGCCAAGAACCTGAACGAGAGCCTGATCGACCTGCAGGAGCTGGG | |
| | CAAGTACGAGCAGTACATCAAGTGGCCCTGGTACATCTGGCTGGGCTT | |
| | CATCGCCGGCCTGATCGCCATCGTGATGGTGACCATCATGCTGTGCTG | |
| | CATGACCAGCTGCTGCAGCTGCCTGAAGGGCTGCTGCAGCTGCGGCA | |
| | GCTGCTGCAAGTTCGACGAGGACGACAGCGAGCCCGTGCTGAAGGGC | |
| | GTGAAGCTGCACTACACCGGAAGCGGAGCCACGAACTTCTCTCTGTTA | |
| | AAGCAAGCAGGAGATGTTGAAGAAAACCCCGGGCCTATGGACCTGTTC | |
| | ATGAGGATCTTCACCATCGGCACCGTGACCCTGAAGCAGGGCGAGATC | |
| | AAGGACGCCACCCCCAGCGACTTCGTGAGGGCCACCGCCACCATCCC | |
| | CATCCAGGCCAGCCTGCCCTTCGGCTGGCTGATCGTGGGCGTGGCCC | |
| | TGCTGGCCGTGTTCCAGAGCGCCAGCAAGATCATCACCCTGAAGAAGA | |
| | GGTGGCAGCTGGCCCTGAGCAAGGGCGTGCACTTCGTGTGCAACCTG | |
| | CTGCTGCTGTTCGTGACCGTGTACAGCCACCTGCTGCTGGTGGCCGCC | |
| | GGCCTGGAGGCCCCCTTCCTGTACCTGTACGCCCTGGTGTACTTCCTG | |
| | CAGAGCATCAACTTCGTGAGGATCATCATGAGGCTGTGGCTGTGCTGG | |
| | AAGTGCAGGAGCAAGAACCCCCTGCTGTACGACGCCAACTACTTCCTG | |
| | TGCTGGCACACCAACTGCTACGACTACTGCATCCCCTACAACAGCGTG | |
| | ACCAGCAGCATCGTGATCACCAGCGGCGACGGCACCACCAGCCCCAT | |
| | CAGCGAGCACGACTACCAGATCGGCGGCTACACCGAGAAGTGGGAGA | |
| | GCGGCGTGAAGGACTGCGTGGTGCTGCACAGCTACTTCACCAGCGACT | |
| | ACTACCAGCTGTACAGCACCCAGCTGAGCACCGACACCGGCGTGGAG | |
| | CACGTGACCTTCTTCATCTACAACAAGATCGTGGACGAGCCCGAGGAG | |
| | CACGTGCAGATCCACACCATCGACGGCAGCAGCGGCGTGGTGAACCC | |
| | CGTGATGGAGCCCATCTACGACGAGCCCACCACCACCACCAGCGTGC | |
| | CCCTGTGATGA | |
| 34 | CTCGACATTGATTATTGACTAGTTATTAATAGTAATCAATTACGGGGTCA | 319 |
| Pan-CoV | TTAGTTCATAGCCCATATATGGAGTTCCGCGTTACATAACTTACGGTAAA | |
| rAdv5-CAG- | TGGCCCGCCTGGCTGACCGCCCAACGACCCCCGCCCATTGACGTCAAT | |
| HexaPro | AATGACGTATGTTCCCATAGTAACGCCAATAGGGACTTTCCATTGACGT | |
| | CAATGGGTGGAGTATTTACGGTAAACTGCCCACTTGGCAGTACATCAAG | |
| | TGTATCATATGCCAAGTACGCCCCCTATTGACGTCAATGACGGTAAATG | |
| | GCCCGCCTGGCATTATGCCCAGTACATGACCTTATGGGACTTTCCTACT | |
| | TGGCAGTACATCTACGTATTAGTCATCGCTATTACCATGGTCGAGGTGA | |
| | GCCCCACGTTCTGCTTCACTCTCCCCATCTCCCCCCCCTCCCCACCCC | |
| | CAATTTTGTATTTATTTATTTTTTAATTATTTTGTGCAGCGATGGGGGCG | |
| | GGGGGGGGGGGGGGGCGCGCGCCAGGCGGGGCGGGGCGGGGCGA | |
| | GGGGCGGGGCGGGGCGAGGCGGAGAGGTGCGGCGGCAGCCAATCA | |
| | GAGCGGCGCGCTCCGAAAGTTTCCTTTTATGGCGAGGCGGCGGCGGC | |
| | GGCGGCCCTATAAAAAGCGAAGCGCGCGGCGGGCGGGAGTCGCTGC | |
| | GCGCTGCCTTCGCCCCGTGCCCCGCTCCGCCGCCGCCTCGCGCCGCC | |
| | CGCCCCGGCTCTGACTGACCGCGTTACTCCCACAGGTGAGCGGGCGG | |
| | GACGGCCCTTCTCCTCCGGGCTGTAATTAGCGCTTGGTTTAATGACGG | |
| | CTTGTTTCTTTTCTGTGGCTGCGTGAAAGCCTTGAGGGGCTCCGGGAG | |
| | GGCCCTTTGTGCGGGGGGAGCGGCTCGGGGGGTGCGTGCGTGTGTG | |
| | TGTGCGTGGGGAGCGCCGCGTGCGGCTCCGCGCTGCCCGGCGGCTG | |
| | TGAGCGCTGCGGGCGCGGCGCGGGGCTTTGTGCGCTCCGCAGTGTGC | |
| | GCGAGGGGAGCGCGGCCGGGGGCGGTGCCCCGCGGTGCGGGGGGG | |
| | GCTGCGAGGGGAACAAAGGCTGCGTGCGGGGTGTGTGCGTGGGGGG | |
| | GTGAGCAGGGGGTGTGGGCGCGTCGGTCGGGCTGCAACCCCCCCTG | |
| | CACCCCCCTCCCCGAGTTGCTGAGCACGGCCCGGCTTCGGGTGCGGG | |
| | GCTCCGTACGGGGCGTGGCGCGGGGCTCGCCGTGCCGGGCGGGGGG | |
| | TGGCGGCAGGTGGGGGTGCCGGGCGGGGCGGGGCCGCCTCGGGCC | |
| | GGGGAGGGCTCGGGGGAGGGGCGCGGCGGCCCCCGGAGCGCCGGC | |
| | GGCTGTCGAGGCGCGGCGAGCCGCAGCCATTGCCTTTTATGGTAATCG | |
| | TGCGAGAGGGCGCAGGGACTTCCTTTGTCCCAAATCTGTGCGGAGCCG | |
| | AAATCTGGGAGGCGCCGCCGCACCCCCTCTAGCGGGCGCGGGGCGAA | |
| | GCGGTGCGGCGCCGGCAGGAAGGAAATGGGCGGGGAGGGCCTTCGT | |
| | GCGTCGCCGCGCCGCCGTCCCCTTCTCCCTCTCCAGCCTCGGGGCTG | |
| | TCCGCGGGGGGACGGCTGCCTTCGGGGGGGACGGGGCAGGGCGGG | |
| | GTTCGGCTTCTGGCGTGTGACCGGCGGCTCTAGAGCCTCTGCTAACCA | |
| | TGTTCATGCCTTCTTCTTTTTCCTACAGCTCCTGGGCAACGTGCTGGTT | |
| | ATTGTGCTGTCTCATCATTTTGGCAAAGAATTGGAGAATAAACTAGTATT | |
| | CTTCTGGTCCCCACAGACTCAGAGAGAACCCGCCACCATGTTCGTGTT | |
| | CCTGGTGCTGCTGCCCCTGGTGAGCAGCCAGTGCGTGAACCTGACCA | |
| | CCAGGACCCAGCTGCCCCCCGCCTACACCAACAGCTTCACCAGGGGC | |
| | GTGTACTACCCCGACAAGGTGTTCAGGAGCAGCGTGCTGCACAGCACC | |
| | CAGGACCTGTTCCTGCCCTTCTTCAGCAACGTGACCTGGTTCCACGCC | |
| | ATCCACGTGAGCGGCACCAACGGCACCAAGAGGTTCGACAACCCCGT | |
| | GCTGCCCTTCAACGACGGCGTGTACTTCGCCAGCACCGAGAAGAGCAA | |
| | CATCATCAGGGGCTGGATCTTCGGCACCACCCTGGACAGCAAGACCCA | |
| | GAGCCTGCTGATCGTGAACAACGCCACCAACGTGGTGATCAAGGTGTG | |
| | CGAGTTCCAGTTCTGCAACGACCCCTTCCTGGGCGTGTACTACCACAA | |
| | GAACAACAAGAGCTGGATGGAGAGCGAGTTCAGGGTGTACAGCAGCG | |
| | CCAACAACTGCACCTTCGAGTACGTGAGCCAGCCCTTCCTGATGGACC | |
| | TGGAGGGCAAGCAGGGCAACTTCAAGAACCTGAGGGAGTTCGTGTTCA | |
| | AGAACATCGACGGCTACTTCAAGATCTACAGCAAGCACACCCCCATCAA | |
| | CCTGGTGAGGGACCTGCCCCAGGGCTTCAGCGCCCTGGAGCCCCTGG | |
| | TGGACCTGCCCATCGGCATCAACATCACCAGGTTCCAGACCCTGCTGG | |
| | CCCTGCACAGGAGCTACCTGACCCCCGGCGACAGCAGCAGCGGCTGG | |
| | ACCGCCGGCGCCGCCGCCTACTACGTGGGCTACCTGCAGCCCAGGAC | |
| | CTTCCTGCTGAAGTACAACGAGAACGGCACCATCACCGACGCCGTGGA | |
| | CTGCGCCCTGGACCCCCTGAGCGAGACCAAGTGCACCCTGAAGAGCTT | |
| | CACCGTGGAGAAGGGCATCTACCAGACCAGCAACTTCAGGGTGCAGCC | |
| | CACCGAGAGCATCGTGAGGTTCCCCAACATCACCAACCTGTGCCCCTT | |
| | CGGCGAGGTGTTCAACGCCACCAGGTTCGCCAGCGTGTACGCCTGGA | |
| | ACAGGAAGAGGATCAGCAACTGCGTGGCCGACTACAGCGTGCTGTACA | |
| | ACAGCGCCAGCTTCAGCACCTTCAAGTGCTACGGCGTGAGCCCCACCA | |
| | AGCTGAACGACCTGTGCTTCACCAACGTGTACGCCGACAGCTTCGTGA | |
| | TCAGGGGCGACGAGGTGAGGCAGATCGCCCCCGGCCAGACCGGCAA | |
| | GATCGCCGACTACAACTACAAGCTGCCCGACGACTTCACCGGCTGCGT | |
| | GATCGCCTGGAACAGCAACAACCTGGACAGCAAGGTGGGCGGCAACT | |
| | ACAACTACCTGTACAGGCTGTTCAGGAAGAGCAACCTGAAGCCCTTCG | |
| | AGAGGGACATCAGCACCGAGATCTACCAGGCCGGCAGCACCCCCTGC | |
| | AACGGCGTGGAGGGCTTCAACTGCTACTTCCCCCTGCAGAGCTACGGC | |
| | TTCCAGCCCACCAACGGCGTGGGCTACCAGCCCTACAGGGTGGTGGT | |
| | GCTGAGCTTCGAGCTGCTGCACGCCCCCGCCACCGTGTGCGGCCCCA | |
| | AGAAGAGCACCAACCTGGTGAAGAACAAGTGCGTGAACTTCAACTTCAA | |
| | CGGCCTGACCGGCACCGGCGTGCTGACCGAGAGCAACAAGAAGTTCC | |
| | TGCCCTTCCAGCAGTTCGGCAGGGACATCGCCGACACCACCGACGCC | |
| | GTGAGGGACCCCCAGACCCTGGAGATCCTGGACATCACCCCCTGCAG | |
| | CTTCGGCGGCGTGAGCGTGATCACCCCCGGCACCAACACCAGCAACC | |
| | AGGTGGCCGTGCTGTACCAGGACGTGAACTGCACCGAGGTGCCCGTG | |
| | GCCATCCACGCCGACCAGCTGACCCCCACCTGGAGGGTGTACAGCAC | |
| | CGGCAGCAACGTGTTCCAGACCAGGGCCGGCTGCCTGATCGGCGCCG | |
| | AGCACGTGAACAACAGCTACGAGTGCGACATCCCCATCGGCGCCGGC | |
| | ATCTGCGCCAGCTACCAGACCCAGACCAACAGCCCCGGCAGCGCCAG | |
| | CAGCGTGGCCAGCCAGAGCATCATCGCCTACACCATGAGCCTGGGCG | |
| | CCGAGAACAGCGTGGCCTACAGCAACAACAGCATCGCCATCCCCACCA | |
| | ACTTCACCATCAGCGTGACCACCGAGATCCTGCCCGTGAGCATGACCA | |
| | AGACCAGCGTGGACTGCACCATGTACATCTGCGGCGACAGCACCGAGT | |
| | GCAGCAACCTGCTGCTGCAGTACGGCAGCTTCTGCACCCAGCTGAACA | |
| | GGGCCCTGACCGGCATCGCCGTGGAGCAGGACAAGAACACCCAGGAG | |
| | GTGTTCGCCCAGGTGAAGCAGATCTACAAGACCCCCCCCATCAAGGAC | |
| | TTCGGCGGCTTCAACTTCAGCCAGATCCTGCCCGACCCCAGCAAGCCC | |
| | AGCAAGAGGAGCCCCATCGAGGACCTGCTGTTCAACAAGGTGACCCTG | |
| | GCCGACGCCGGCTTCATCAAGCAGTACGGCGACTGCCTGGGCGACAT | |
| | CGCCGCCAGGGACCTGATCTGCGCCCAGAAGTTCAACGGCCTGACCG | |
| | TGCTGCCCCCCCTGCTGACCGACGAGATGATCGCCCAGTACACCAGCG | |
| | CCCTGCTGGCCGGCACCATCACCAGCGGCTGGACCTTCGGCGCCGGC | |
| | CCCGCCCTGCAGATCCCCTTCCCCATGCAGATGGCCTACAGGTTCAAC | |
| | GGCATCGGCGTGACCCAGAACGTGCTGTACGAGAACCAGAAGCTGATC | |
| | GCCAACCAGTTCAACAGCGCCATCGGCAAGATCCAGGACAGCCTGAGC | |
| | AGCACCCCCAGCGCCCTGGGCAAGCTGCAGGACGTGGTGAACCAGAA | |
| | CGCCCAGGCCCTGAACACCCTGGTGAAGCAGCTGAGCAGCAACTTCG | |
| | GCGCCATCAGCAGCGTGCTGAACGACATCCTGAGCAGGCTGGACCCC | |
| | CCCGAGGCCGAGGTGCAGATCGACAGGCTGATCACCGGCAGGCTGCA | |
| | GAGCCTGCAGACCTACGTGACCCAGCAGCTGATCAGGGCCGCCGAGA | |
| | TCAGGGCCAGCGCCAACCTGGCCGCCACCAAGATGAGCGAGTGCGTG | |
| | CTGGGCCAGAGCAAGAGGGTGGACTTCTGCGGCAAGGGCTACCACCT | |
| | GATGAGCTTCCCCCAGAGCGCCCCCCACGGCGTGGTGTTCCTGCACG | |
| | TGACCTACGTGCCCGCCCAGGAGAAGAACTTCACCACCGCCCCCGCCA | |
| | TCTGCCACGACGGCAAGGCCCACTTCCCCAGGGAGGGCGTGTTCGTG | |
| | AGCAACGGCACCCACTGGTTCGTGACCCAGAGGAACTTCTACGAGCCC | |
| | CAGATCATCACCACCGACAACACCTTCGTGAGCGGCAACTGCGACGTG | |
| | GTGATCGGCATCGTGAACAACACCGTGTACGACCCCCTGCAGCCCGAG | |
| | CTGGACAGCTTCAAGGAGGAGCTGGACAAGTACTTCAAGAACCACACC | |
| | AGCCCCGACGTGGACCTGGGCGACATCAGCGGCATCAACGCCAGCGT | |
| | GGTGAACATCCAGAAGGAGATCGACAGGCTGAACGAGGTGGCCAAGA | |
| | ACCTGAACGAGAGCCTGATCGACCTGCAGGAGCTGGGCAAGTACGAG | |
| | CAGTACATCAAGTGGCCCTGGTACATCTGGCTGGGCTTCATCGCCGGC | |
| | CTGATCGCCATCGTGATGGTGACCATCATGCTGTGCTGCATGACCAGC | |
| | TGCTGCAGCTGCCTGAAGGGCTGCTGCAGCTGCGGCAGCTGCTGCAA | |
| | GTTCGACGAGGACGACAGCGAGCCCGTGCTGAAGGGCGTGAAGCTGC | |
| | ACTACACCTGATGACTCGAGCTGGTACTGCATGCACGCAATGCTAGCT | |
| | GCCCCTTTCCCGTCCTGGGTACCCCGAGTCTCCCCCGACCTCGGGTCC | |
| | CAGGTATGCTCCCACCTCCACCTGCCCCACTCACCACCTCTGCTAGTTC | |
| | CAGACACCTCCCAAGCACGCAGCAATGCAGCTCAAAACGCTTAGCCTA | |
| | GCCACACCCCCACGGGAAACAGCAGTGATTAACCTTTAGCAATAAACG | |
| | AAAGTTTAACTAAGCTATACTAACCCCAGGGTTGGTCAATTTCGTGCCA | |
| | GCCACACCCTGGAGCTAGCAAAAAAAA | |
| 35 | CTCGACATTGATTATTGACTAGTTATTAATAGTAATCAATTACGGGGTCA | 320 |
| Pan-CoV | TTAGTTCATAGCCCATATATGGAGTTCCGCGTTACATAACTTACGGTAAA | |
| rAdv5-CAG- | TGGCCCGCCTGGCTGACCGCCCAACGACCCCCGCCCATTGACGTCAAT | |
| Two Proline | AATGACGTATGTTCCCATAGTAACGCCAATAGGGACTTTCCATTGACGT | |
| substitution | CAATGGGTGGAGTATTTACGGTAAACTGCCCACTTGGCAGTACATCAAG | |
| | TGTATCATATGCCAAGTACGCCCCCTATTGACGTCAATGACGGTAAATG | |
| | GCCCGCCTGGCATTATGCCCAGTACATGACCTTATGGGACTTTCCTACT | |
| | TGGCAGTACATCTACGTATTAGTCATCGCTATTACCATGGTCGAGGTGA | |
| | GCCCCACGTTCTGCTTCACTCTCCCCATCTCCCCCCCCTCCCCACCCC | |
| | CAATTTTGTATTTATTTATTTTTTAATTATTTTGTGCAGCGATGGGGGCG | |
| | GGGGGGGGGGGGGGGCGCGCGCCAGGCGGGGCGGGGCGGGGCGA | |
| | GGGGCGGGGCGGGGCGAGGCGGAGAGGTGCGGCGGCAGCCAATCA | |
| | GAGCGGCGCGCTCCGAAAGTTTCCTTTTATGGCGAGGCGGCGGCGGC | |
| | GGCGGCCCTATAAAAAGCGAAGCGCGCGGCGGGCGGGAGTCGCTGC | |
| | GCGCTGCCTTCGCCCCGTGCCCCGCTCCGCCGCCGCCTCGCGCCGCC | |
| | CGCCCCGGCTCTGACTGACCGCGTTACTCCCACAGGTGAGCGGGCGG | |
| | GACGGCCCTTCTCCTCCGGGCTGTAATTAGCGCTTGGTTTAATGACGG | |
| | CTTGTTTCTTTTCTGTGGCTGCGTGAAAGCCTTGAGGGGCTCCGGGAG | |
| | GGCCCTTTGTGCGGGGGGAGCGGCTCGGGGGGTGCGTGCGTGTGTG | |
| | TGTGCGTGGGGAGCGCCGCGTGCGGCTCCGCGCTGCCCGGCGGCTG | |
| | TGAGCGCTGCGGGCGCGGCGCGGGGCTTTGTGCGCTCCGCAGTGTGC | |
| | GCGAGGGGAGCGCGGCCGGGGGCGGTGCCCCGCGGTGCGGGGGGG | |
| | GCTGCGAGGGGAACAAAGGCTGCGTGCGGGGTGTGTGCGTGGGGGG | |
| | GTGAGCAGGGGGTGTGGGCGCGTCGGTCGGGCTGCAACCCCCCCTG | |
| | CACCCCCCTCCCCGAGTTGCTGAGCACGGCCCGGCTTCGGGTGCGGG | |
| | GCTCCGTACGGGGCGTGGCGCGGGGCTCGCCGTGCCGGGCGGGGGG | |
| | TGGCGGCAGGTGGGGGTGCCGGGCGGGGCGGGGCCGCCTCGGGCC | |
| | GGGGAGGGCTCGGGGGAGGGGCGCGGCGGCCCCCGGAGCGCCGGC | |
| | GGCTGTCGAGGCGCGGCGAGCCGCAGCCATTGCCTTTTATGGTAATCG | |
| | TGCGAGAGGGCGCAGGGACTTCCTTTGTCCCAAATCTGTGCGGAGCCG | |
| | AAATCTGGGAGGCGCCGCCGCACCCCCTCTAGCGGGCGCGGGGCGAA | |
| | GCGGTGCGGCGCCGGCAGGAAGGAAATGGGCGGGGAGGGCCTTCGT | |
| | GCGTCGCCGCGCCGCCGTCCCCTTCTCCCTCTCCAGCCTCGGGGCTG | |
| | TCCGCGGGGGGACGGCTGCCTTCGGGGGGGACGGGGCAGGGCGGG | |
| | GTTCGGCTTCTGGCGTGTGACCGGCGGCTCTAGAGCCTCTGCTAACCA | |
| | TGTTCATGCCTTCTTCTTTTTCCTACAGCTCCTGGGCAACGTGCTGGTT | |
| | ATTGTGCTGTCTCATCATTTTGGCAAAGAATTGGAGAATAAACTAGTATT | |
| | CTTCTGGTCCCCACAGACTCAGAGAGAACCCGCCACCATGTTCGTGTT | |
| | CCTGGTGCTGCTGCCCCTGGTGAGCAGCCAGTGCGTGAACCTGACCA | |
| | CCAGGACCCAGCTGCCCCCCGCCTACACCAACAGCTTCACCAGGGGC | |
| | GTGTACTACCCCGACAAGGTGTTCAGGAGCAGCGTGCTGCACAGCACC | |
| | CAGGACCTGTTCCTGCCCTTCTTCAGCAACGTGACCTGGTTCCACGCC | |
| | ATCCACGTGAGCGGCACCAACGGCACCAAGAGGTTCGACAACCCCGT | |
| | GCTGCCCTTCAACGACGGCGTGTACTTCGCCAGCACCGAGAAGAGCAA | |
| | CATCATCAGGGGCTGGATCTTCGGCACCACCCTGGACAGCAAGACCCA | |
| | GAGCCTGCTGATCGTGAACAACGCCACCAACGTGGTGATCAAGGTGTG | |
| | CGAGTTCCAGTTCTGCAACGACCCCTTCCTGGGCGTGTACTACCACAA | |
| | GAACAACAAGAGCTGGATGGAGAGCGAGTTCAGGGTGTACAGCAGCG | |
| | CCAACAACTGCACCTTCGAGTACGTGAGCCAGCCCTTCCTGATGGACC | |
| | TGGAGGGCAAGCAGGGCAACTTCAAGAACCTGAGGGAGTTCGTGTTCA | |
| | AGAACATCGACGGCTACTTCAAGATCTACAGCAAGCACACCCCCATCAA | |
| | CCTGGTGAGGGACCTGCCCCAGGGCTTCAGCGCCCTGGAGCCCCTGG | |
| | TGGACCTGCCCATCGGCATCAACATCACCAGGTTCCAGACCCTGCTGG | |
| | CCCTGCACAGGAGCTACCTGACCCCCGGCGACAGCAGCAGCGGCTGG | |
| | ACCGCCGGCGCCGCCGCCTACTACGTGGGCTACCTGCAGCCCAGGAC | |
| | CTTCCTGCTGAAGTACAACGAGAACGGCACCATCACCGACGCCGTGGA | |
| | CTGCGCCCTGGACCCCCTGAGCGAGACCAAGTGCACCCTGAAGAGCTT | |
| | CACCGTGGAGAAGGGCATCTACCAGACCAGCAACTTCAGGGTGCAGCC | |
| | CACCGAGAGCATCGTGAGGTTCCCCAACATCACCAACCTGTGCCCCTT | |
| | CGGCGAGGTGTTCAACGCCACCAGGTTCGCCAGCGTGTACGCCTGGA | |
| | ACAGGAAGAGGATCAGCAACTGCGTGGCCGACTACAGCGTGCTGTACA | |
| | ACAGCGCCAGCTTCAGCACCTTCAAGTGCTACGGCGTGAGCCCCACCA | |
| | AGCTGAACGACCTGTGCTTCACCAACGTGTACGCCGACAGCTTCGTGA | |
| | TCAGGGGCGACGAGGTGAGGCAGATCGCCCCCGGCCAGACCGGCAA | |
| | GATCGCCGACTACAACTACAAGCTGCCCGACGACTTCACCGGCTGCGT | |
| | GATCGCCTGGAACAGCAACAACCTGGACAGCAAGGTGGGCGGCAACT | |
| | ACAACTACCTGTACAGGCTGTTCAGGAAGAGCAACCTGAAGCCCTTCG | |
| | AGAGGGACATCAGCACCGAGATCTACCAGGCCGGCAGCACCCCCTGC | |
| | AACGGCGTGGAGGGCTTCAACTGCTACTTCCCCCTGCAGAGCTACGGC | |
| | TTCCAGCCCACCAACGGCGTGGGCTACCAGCCCTACAGGGTGGTGGT | |
| | GCTGAGCTTCGAGCTGCTGCACGCCCCCGCCACCGTGTGCGGCCCCA | |
| | AGAAGAGCACCAACCTGGTGAAGAACAAGTGCGTGAACTTCAACTTCAA | |
| | CGGCCTGACCGGCACCGGCGTGCTGACCGAGAGCAACAAGAAGTTCC | |
| | TGCCCTTCCAGCAGTTCGGCAGGGACATCGCCGACACCACCGACGCC | |
| | GTGAGGGACCCCCAGACCCTGGAGATCCTGGACATCACCCCCTGCAG | |
| | CTTCGGCGGCGTGAGCGTGATCACCCCCGGCACCAACACCAGCAACC | |
| | AGGTGGCCGTGCTGTACCAGGACGTGAACTGCACCGAGGTGCCCGTG | |
| | GCCATCCACGCCGACCAGCTGACCCCCACCTGGAGGGTGTACAGCAC | |
| | CGGCAGCAACGTGTTCCAGACCAGGGCCGGCTGCCTGATCGGCGCCG | |
| | AGCACGTGAACAACAGCTACGAGTGCGACATCCCCATCGGCGCCGGC | |
| | ATCTGCGCCAGCTACCAGACCCAGACCAACAGCCCCAGGAGGGCCAG | |
| | GAGCGTGGCCAGCCAGAGCATCATCGCCTACACCATGAGCCTGGGCG | |
| | CCGAGAACAGCGTGGCCTACAGCAACAACAGCATCGCCATCCCCACCA | |
| | ACTTCACCATCAGCGTGACCACCGAGATCCTGCCCGTGAGCATGACCA | |
| | AGACCAGCGTGGACTGCACCATGTACATCTGCGGCGACAGCACCGAGT | |
| | GCAGCAACCTGCTGCTGCAGTACGGCAGCTTCTGCACCCAGCTGAACA | |
| | GGGCCCTGACCGGCATCGCCGTGGAGCAGGACAAGAACACCCAGGAG | |
| | GTGTTCGCCCAGGTGAAGCAGATCTACAAGACCCCCCCCATCAAGGAC | |
| | TTCGGCGGCTTCAACTTCAGCCAGATCCTGCCCGACCCCAGCAAGCCC | |
| | AGCAAGAGGAGCTTCATCGAGGACCTGCTGTTCAACAAGGTGACCCTG | |
| | GCCGACGCCGGCTTCATCAAGCAGTACGGCGACTGCCTGGGCGACAT | |
| | CGCCGCCAGGGACCTGATCTGCGCCCAGAAGTTCAACGGCCTGACCG | |
| | TGCTGCCCCCCCTGCTGACCGACGAGATGATCGCCCAGTACACCAGCG | |
| | CCCTGCTGGCCGGCACCATCACCAGCGGCTGGACCTTCGGCGCCGGC | |
| | GCCGCCCTGCAGATCCCCTTCGCCATGCAGATGGCCTACAGGTTCAAC | |
| | GGCATCGGCGTGACCCAGAACGTGCTGTACGAGAACCAGAAGCTGATC | |
| | GCCAACCAGTTCAACAGCGCCATCGGCAAGATCCAGGACAGCCTGAGC | |
| | AGCACCGCCAGCGCCCTGGGCAAGCTGCAGGACGTGGTGAACCAGAA | |
| | CGCCCAGGCCCTGAACACCCTGGTGAAGCAGCTGAGCAGCAACTTCG | |
| | GCGCCATCAGCAGCGTGCTGAACGACATCCTGAGCAGGCTGGACCCC | |
| | CCCGAGGCCGAGGTGCAGATCGACAGGCTGATCACCGGCAGGCTGCA | |
| | GAGCCTGCAGACCTACGTGACCCAGCAGCTGATCAGGGCCGCCGAGA | |
| | TCAGGGCCAGCGCCAACCTGGCCGCCACCAAGATGAGCGAGTGCGTG | |
| | CTGGGCCAGAGCAAGAGGGTGGACTTCTGCGGCAAGGGCTACCACCT | |
| | GATGAGCTTCCCCCAGAGCGCCCCCCACGGCGTGGTGTTCCTGCACG | |
| | TGACCTACGTGCCCGCCCAGGAGAAGAACTTCACCACCGCCCCCGCCA | |
| | TCTGCCACGACGGCAAGGCCCACTTCCCCAGGGAGGGCGTGTTCGTG | |
| | AGCAACGGCACCCACTGGTTCGTGACCCAGAGGAACTTCTACGAGCCC | |
| | CAGATCATCACCACCGACAACACCTTCGTGAGCGGCAACTGCGACGTG | |
| | GTGATCGGCATCGTGAACAACACCGTGTACGACCCCCTGCAGCCCGAG | |
| | CTGGACAGCTTCAAGGAGGAGCTGGACAAGTACTTCAAGAACCACACC | |
| | AGCCCCGACGTGGACCTGGGCGACATCAGCGGCATCAACGCCAGCGT | |
| | GGTGAACATCCAGAAGGAGATCGACAGGCTGAACGAGGTGGCCAAGA | |
| | ACCTGAACGAGAGCCTGATCGACCTGCAGGAGCTGGGCAAGTACGAG | |
| | CAGTACATCAAGTGGCCCTGGTACATCTGGCTGGGCTTCATCGCCGGC | |
| | CTGATCGCCATCGTGATGGTGACCATCATGCTGTGCTGCATGACCAGC | |
| | TGCTGCAGCTGCCTGAAGGGCTGCTGCAGCTGCGGCAGCTGCTGCAA | |
| | GTTCGACGAGGACGACAGCGAGCCCGTGCTGAAGGGCGTGAAGCTGC | |
| | ACTACACCTGATGACTCGAGCTGGTACTGCATGCACGCAATGCTAGCT | |
| | GCCCCTTTCCCGTCCTGGGTACCCCGAGTCTCCCCCGACCTCGGGTCC | |
| | CAGGTATGCTCCCACCTCCACCTGCCCCACTCACCACCTCTGCTAGTTC | |
| | CAGACACCTCCCAAGCACGCAGCAATGCAGCTCAAAACGCTTAGCCTA | |
| | GCCACACCCCCACGGGAAACAGCAGTGATTAACCTTTAGCAATAAACG | |
| | AAAGTTTAACTAAGCTATACTAACCCCAGGGTTGGTCAATTTCGTGCCA | |
| | GCCACACCCTGGAGCTAGCAAAAAAAA | |
| 36 | TAGTTATTAATAGTAATCAATTACGGGGTCATTAGTTCATAGCCCATATA | 321 |
| Pan-CoV | TGGAGTTCCGCGTTACATAACTTACGGTAAATGGCCCGCCTGGCTGAC | |
| rAdv5-CMV- | CGCCCAACGACCCCCGCCCATTGACGTCAATAATGACGTATGTTCCCAT | |
| HexaPro | AGTAACGCCAATAGGGACTTTCCATTGACGTCAATGGGTGGAGTATTTA | |
| | CGGTAAACTGCCCACTTGGCAGTACATCAAGTGTATCATATGCCAAGTA | |
| | CGCCCCCTATTGACGTCAATGACGGTAAATGGCCCGCCTGGCATTATG | |
| | CCCAGTACATGACCTTATGGGACTTTCCTACTTGGCAGTACATCTACGT | |
| | ATTAGTCATCGCTATTACCATGGTGATGCGGTTTTGGCAGTACATCAAT | |
| | GGGCGTGGATAGCGGTTTGACTCACGGGGATTTCCAAGTCTCCACCCC | |
| | ATTGACGTCAATGGGAGTTTGTTTTGGCACCAAAATCAACGGGACTTTC | |
| | CAAAATGTCGTAACAACTCCGCCCCATTGACGCAAATGGGCGGTAGGC | |
| | GTGTACGGTGGGAGGTCTATATAAGCAGAGCTGGTTTAGTGAACCGTC | |
| | AGATCGAGAATAAACTAGTATTCTTCTGGTCCCCACAGACTCAGAGAGA | |
| | ACCCGCCACCATGTTCGTGTTCCTGGTGCTGCTGCCCCTGGTGAGCAG | |
| | CCAGTGCGTGAACCTGACCACCAGGACCCAGCTGCCCCCCGCCTACA | |
| | CCAACAGCTTCACCAGGGGCGTGTACTACCCCGACAAGGTGTTCAGGA | |
| | GCAGCGTGCTGCACAGCACCCAGGACCTGTTCCTGCCCTTCTTCAGCA | |
| | ACGTGACCTGGTTCCACGCCATCCACGTGAGCGGCACCAACGGCACCA | |
| | AGAGGTTCGACAACCCCGTGCTGCCCTTCAACGACGGCGTGTACTTCG | |
| | CCAGCACCGAGAAGAGCAACATCATCAGGGGCTGGATCTTCGGCACCA | |
| | CCCTGGACAGCAAGACCCAGAGCCTGCTGATCGTGAACAACGCCACCA | |
| | ACGTGGTGATCAAGGTGTGCGAGTTCCAGTTCTGCAACGACCCCTTCC | |
| | TGGGCGTGTACTACCACAAGAACAACAAGAGCTGGATGGAGAGCGAGT | |
| | TCAGGGTGTACAGCAGCGCCAACAACTGCACCTTCGAGTACGTGAGCC | |
| | AGCCCTTCCTGATGGACCTGGAGGGCAAGCAGGGCAACTTCAAGAACC | |
| | TGAGGGAGTTCGTGTTCAAGAACATCGACGGCTACTTCAAGATCTACAG | |
| | CAAGCACACCCCCATCAACCTGGTGAGGGACCTGCCCCAGGGCTTCAG | |
| | CGCCCTGGAGCCCCTGGTGGACCTGCCCATCGGCATCAACATCACCAG | |
| | GTTCCAGACCCTGCTGGCCCTGCACAGGAGCTACCTGACCCCCGGCG | |
| | ACAGCAGCAGCGGCTGGACCGCCGGCGCCGCCGCCTACTACGTGGGC | |
| | TACCTGCAGCCCAGGACCTTCCTGCTGAAGTACAACGAGAACGGCACC | |
| | ATCACCGACGCCGTGGACTGCGCCCTGGACCCCCTGAGCGAGACCAA | |
| | GTGCACCCTGAAGAGCTTCACCGTGGAGAAGGGCATCTACCAGACCAG | |
| | CAACTTCAGGGTGCAGCCCACCGAGAGCATCGTGAGGTTCCCCAACAT | |
| | CACCAACCTGTGCCCCTTCGGCGAGGTGTTCAACGCCACCAGGTTCGC | |
| | CAGCGTGTACGCCTGGAACAGGAAGAGGATCAGCAACTGCGTGGCCG | |
| | ACTACAGCGTGCTGTACAACAGCGCCAGCTTCAGCACCTTCAAGTGCT | |
| | ACGGCGTGAGCCCCACCAAGCTGAACGACCTGTGCTTCACCAACGTGT | |
| | ACGCCGACAGCTTCGTGATCAGGGGCGACGAGGTGAGGCAGATCGCC | |
| | CCCGGCCAGACCGGCAAGATCGCCGACTACAACTACAAGCTGCCCGA | |
| | CGACTTCACCGGCTGCGTGATCGCCTGGAACAGCAACAACCTGGACAG | |
| | CAAGGTGGGCGGCAACTACAACTACCTGTACAGGCTGTTCAGGAAGAG | |
| | CAACCTGAAGCCCTTCGAGAGGGACATCAGCACCGAGATCTACCAGGC | |
| | CGGCAGCACCCCCTGCAACGGCGTGGAGGGCTTCAACTGCTACTTCCC | |
| | CCTGCAGAGCTACGGCTTCCAGCCCACCAACGGCGTGGGCTACCAGC | |
| | CCTACAGGGTGGTGGTGCTGAGCTTCGAGCTGCTGCACGCCCCCGCC | |
| | ACCGTGTGCGGCCCCAAGAAGAGCACCAACCTGGTGAAGAACAAGTGC | |
| | GTGAACTTCAACTTCAACGGCCTGACCGGCACCGGCGTGCTGACCGAG | |
| | AGCAACAAGAAGTTCCTGCCCTTCCAGCAGTTCGGCAGGGACATCGCC | |
| | GACACCACCGACGCCGTGAGGGACCCCCAGACCCTGGAGATCCTGGA | |
| | CATCACCCCCTGCAGCTTCGGCGGCGTGAGCGTGATCACCCCCGGCA | |
| | CCAACACCAGCAACCAGGTGGCCGTGCTGTACCAGGACGTGAACTGCA | |
| | CCGAGGTGCCCGTGGCCATCCACGCCGACCAGCTGACCCCCACCTGG | |
| | AGGGTGTACAGCACCGGCAGCAACGTGTTCCAGACCAGGGCCGGCTG | |
| | CCTGATCGGCGCCGAGCACGTGAACAACAGCTACGAGTGCGACATCCC | |
| | CATCGGCGCCGGCATCTGCGCCAGCTACCAGACCCAGACCAACAGCC | |
| | CCGGCAGCGCCAGCAGCGTGGCCAGCCAGAGCATCATCGCCTACACC | |
| | ATGAGCCTGGGCGCCGAGAACAGCGTGGCCTACAGCAACAACAGCAT | |
| | CGCCATCCCCACCAACTTCACCATCAGCGTGACCACCGAGATCCTGCC | |
| | CGTGAGCATGACCAAGACCAGCGTGGACTGCACCATGTACATCTGCGG | |
| | CGACAGCACCGAGTGCAGCAACCTGCTGCTGCAGTACGGCAGCTTCTG | |
| | CACCCAGCTGAACAGGGCCCTGACCGGCATCGCCGTGGAGCAGGACA | |
| | AGAACACCCAGGAGGTGTTCGCCCAGGTGAAGCAGATCTACAAGACCC | |
| | CCCCCATCAAGGACTTCGGCGGCTTCAACTTCAGCCAGATCCTGCCCG | |
| | ACCCCAGCAAGCCCAGCAAGAGGAGCCCCATCGAGGACCTGCTGTTCA | |
| | ACAAGGTGACCCTGGCCGACGCCGGCTTCATCAAGCAGTACGGCGACT | |
| | GCCTGGGCGACATCGCCGCCAGGGACCTGATCTGCGCCCAGAAGTTC | |
| | AACGGCCTGACCGTGCTGCCCCCCCTGCTGACCGACGAGATGATCGC | |
| | CCAGTACACCAGCGCCCTGCTGGCCGGCACCATCACCAGCGGCTGGA | |
| | CCTTCGGCGCCGGCCCCGCCCTGCAGATCCCCTTCCCCATGCAGATG | |
| | GCCTACAGGTTCAACGGCATCGGCGTGACCCAGAACGTGCTGTACGAG | |
| | AACCAGAAGCTGATCGCCAACCAGTTCAACAGCGCCATCGGCAAGATC | |
| | CAGGACAGCCTGAGCAGCACCCCCAGCGCCCTGGGCAAGCTGCAGGA | |
| | CGTGGTGAACCAGAACGCCCAGGCCCTGAACACCCTGGTGAAGCAGC | |
| | TGAGCAGCAACTTCGGCGCCATCAGCAGCGTGCTGAACGACATCCTGA | |
| | GCAGGCTGGACCCCCCCGAGGCCGAGGTGCAGATCGACAGGCTGATC | |
| | ACCGGCAGGCTGCAGAGCCTGCAGACCTACGTGACCCAGCAGCTGAT | |
| | CAGGGCCGCCGAGATCAGGGCCAGCGCCAACCTGGCCGCCACCAAGA | |
| | TGAGCGAGTGCGTGCTGGGCCAGAGCAAGAGGGTGGACTTCTGCGGC | |
| | AAGGGCTACCACCTGATGAGCTTCCCCCAGAGCGCCCCCCACGGCGT | |
| | GGTGTTCCTGCACGTGACCTACGTGCCCGCCCAGGAGAAGAACTTCAC | |
| | CACCGCCCCCGCCATCTGCCACGACGGCAAGGCCCACTTCCCCAGGG | |
| | AGGGCGTGTTCGTGAGCAACGGCACCCACTGGTTCGTGACCCAGAGG | |
| | AACTTCTACGAGCCCCAGATCATCACCACCGACAACACCTTCGTGAGC | |
| | GGCAACTGCGACGTGGTGATCGGCATCGTGAACAACACCGTGTACGAC | |
| | CCCCTGCAGCCCGAGCTGGACAGCTTCAAGGAGGAGCTGGACAAGTA | |
| | CTTCAAGAACCACACCAGCCCCGACGTGGACCTGGGCGACATCAGCG | |
| | GCATCAACGCCAGCGTGGTGAACATCCAGAAGGAGATCGACAGGCTGA | |
| | ACGAGGTGGCCAAGAACCTGAACGAGAGCCTGATCGACCTGCAGGAG | |
| | CTGGGCAAGTACGAGCAGTACATCAAGTGGCCCTGGTACATCTGGCTG | |
| | GGCTTCATCGCCGGCCTGATCGCCATCGTGATGGTGACCATCATGCTG | |
| | TGCTGCATGACCAGCTGCTGCAGCTGCCTGAAGGGCTGCTGCAGCTGC | |
| | GGCAGCTGCTGCAAGTTCGACGAGGACGACAGCGAGCCCGTGCTGAA | |
| | GGGCGTGAAGCTGCACTACACCTGATGACTCGAGCTGGTACTGCATGC | |
| | ACGCAATGCTAGCTGCCCCTTTCCCGTCCTGGGTACCCCGAGTCTCCC | |
| | CCGACCTCGGGTCCCAGGTATGCTCCCACCTCCACCTGCCCCACTCAC | |
| | CACCTCTGCTAGTTCCAGACACCTCCCAAGCACGCAGCAATGCAGCTC | |
| | AAAACGCTTAGCCTAGCCACACCCCCACGGGAAACAGCAGTGATTAAC | |
| | CTTTAGCAATAAACGAAAGTTTAACTAAGCTATACTAACCCCAGGGTTG | |
| | GTCAATTTCGTGCCAGCCACACCCTGGAGCTAGCAAAAAAAA | |
| 37 | TAGTTATTAATAGTAATCAATTACGGGGTCATTAGTTCATAGCCCATATA | 322 |
| Pan-CoV | TGGAGTTCCGCGTTACATAACTTACGGTAAATGGCCCGCCTGGCTGAC | |
| rAdv5-CMV- | CGCCCAACGACCCCCGCCCATTGACGTCAATAATGACGTATGTTCCCAT | |
| Two Proline | AGTAACGCCAATAGGGACTTTCCATTGACGTCAATGGGTGGAGTATTTA | |
| substitution | CGGTAAACTGCCCACTTGGCAGTACATCAAGTGTATCATATGCCAAGTA | |
| | CGCCCCCTATTGACGTCAATGACGGTAAATGGCCCGCCTGGCATTATG | |
| | CCCAGTACATGACCTTATGGGACTTTCCTACTTGGCAGTACATCTACGT | |
| | ATTAGTCATCGCTATTACCATGGTGATGCGGTTTTGGCAGTACATCAAT | |
| | GGGCGTGGATAGCGGTTTGACTCACGGGGATTTCCAAGTCTCCACCCC | |
| | ATTGACGTCAATGGGAGTTTGTTTTGGCACCAAAATCAACGGGACTTTC | |
| | CAAAATGTCGTAACAACTCCGCCCCATTGACGCAAATGGGCGGTAGGC | |
| | GTGTACGGTGGGAGGTCTATATAAGCAGAGCTGGTTTAGTGAACCGTC | |
| | AGATCGAGAATAAACTAGTATTCTTCTGGTCCCCACAGACTCAGAGAGA | |
| | ACCCGCCACCATGTTCGTGTTCCTGGTGCTGCTGCCCCTGGTGAGCAG | |
| | CCAGTGCGTGAACCTGACCACCAGGACCCAGCTGCCCCCCGCCTACA | |
| | CCAACAGCTTCACCAGGGGCGTGTACTACCCCGACAAGGTGTTCAGGA | |
| | GCAGCGTGCTGCACAGCACCCAGGACCTGTTCCTGCCCTTCTTCAGCA | |
| | ACGTGACCTGGTTCCACGCCATCCACGTGAGCGGCACCAACGGCACCA | |
| | AGAGGTTCGACAACCCCGTGCTGCCCTTCAACGACGGCGTGTACTTCG | |
| | CCAGCACCGAGAAGAGCAACATCATCAGGGGCTGGATCTTCGGCACCA | |
| | CCCTGGACAGCAAGACCCAGAGCCTGCTGATCGTGAACAACGCCACCA | |
| | ACGTGGTGATCAAGGTGTGCGAGTTCCAGTTCTGCAACGACCCCTTCC | |
| | TGGGCGTGTACTACCACAAGAACAACAAGAGCTGGATGGAGAGCGAGT | |
| | TCAGGGTGTACAGCAGCGCCAACAACTGCACCTTCGAGTACGTGAGCC | |
| | AGCCCTTCCTGATGGACCTGGAGGGCAAGCAGGGCAACTTCAAGAACC | |
| | TGAGGGAGTTCGTGTTCAAGAACATCGACGGCTACTTCAAGATCTACAG | |
| | CAAGCACACCCCCATCAACCTGGTGAGGGACCTGCCCCAGGGCTTCAG | |
| | CGCCCTGGAGCCCCTGGTGGACCTGCCCATCGGCATCAACATCACCAG | |
| | GTTCCAGACCCTGCTGGCCCTGCACAGGAGCTACCTGACCCCCGGCG | |
| | ACAGCAGCAGCGGCTGGACCGCCGGCGCCGCCGCCTACTACGTGGGC | |
| | TACCTGCAGCCCAGGACCTTCCTGCTGAAGTACAACGAGAACGGCACC | |
| | ATCACCGACGCCGTGGACTGCGCCCTGGACCCCCTGAGCGAGACCAA | |
| | GTGCACCCTGAAGAGCTTCACCGTGGAGAAGGGCATCTACCAGACCAG | |
| | CAACTTCAGGGTGCAGCCCACCGAGAGCATCGTGAGGTTCCCCAACAT | |
| | CACCAACCTGTGCCCCTTCGGCGAGGTGTTCAACGCCACCAGGTTCGC | |
| | CAGCGTGTACGCCTGGAACAGGAAGAGGATCAGCAACTGCGTGGCCG | |
| | ACTACAGCGTGCTGTACAACAGCGCCAGCTTCAGCACCTTCAAGTGCT | |
| | ACGGCGTGAGCCCCACCAAGCTGAACGACCTGTGCTTCACCAACGTGT | |
| | ACGCCGACAGCTTCGTGATCAGGGGCGACGAGGTGAGGCAGATCGCC | |
| | CCCGGCCAGACCGGCAAGATCGCCGACTACAACTACAAGCTGCCCGA | |
| | CGACTTCACCGGCTGCGTGATCGCCTGGAACAGCAACAACCTGGACAG | |
| | CAAGGTGGGCGGCAACTACAACTACCTGTACAGGCTGTTCAGGAAGAG | |
| | CAACCTGAAGCCCTTCGAGAGGGACATCAGCACCGAGATCTACCAGGC | |
| | CGGCAGCACCCCCTGCAACGGCGTGGAGGGCTTCAACTGCTACTTCCC | |
| | CCTGCAGAGCTACGGCTTCCAGCCCACCAACGGCGTGGGCTACCAGC | |
| | CCTACAGGGTGGTGGTGCTGAGCTTCGAGCTGCTGCACGCCCCCGCC | |
| | ACCGTGTGCGGCCCCAAGAAGAGCACCAACCTGGTGAAGAACAAGTGC | |
| | GTGAACTTCAACTTCAACGGCCTGACCGGCACCGGCGTGCTGACCGAG | |
| | AGCAACAAGAAGTTCCTGCCCTTCCAGCAGTTCGGCAGGGACATCGCC | |
| | GACACCACCGACGCCGTGAGGGACCCCCAGACCCTGGAGATCCTGGA | |
| | CATCACCCCCTGCAGCTTCGGCGGCGTGAGCGTGATCACCCCCGGCA | |
| | CCAACACCAGCAACCAGGTGGCCGTGCTGTACCAGGACGTGAACTGCA | |
| | CCGAGGTGCCCGTGGCCATCCACGCCGACCAGCTGACCCCCACCTGG | |
| | AGGGTGTACAGCACCGGCAGCAACGTGTTCCAGACCAGGGCCGGCTG | |
| | CCTGATCGGCGCCGAGCACGTGAACAACAGCTACGAGTGCGACATCCC | |
| | CATCGGCGCCGGCATCTGCGCCAGCTACCAGACCCAGACCAACAGCC | |
| | CCAGGAGGGCCAGGAGCGTGGCCAGCCAGAGCATCATCGCCTACACC | |
| | ATGAGCCTGGGCGCCGAGAACAGCGTGGCCTACAGCAACAACAGCAT | |
| | CGCCATCCCCACCAACTTCACCATCAGCGTGACCACCGAGATCCTGCC | |
| | CGTGAGCATGACCAAGACCAGCGTGGACTGCACCATGTACATCTGCGG | |
| | CGACAGCACCGAGTGCAGCAACCTGCTGCTGCAGTACGGCAGCTTCTG | |
| | CACCCAGCTGAACAGGGCCCTGACCGGCATCGCCGTGGAGCAGGACA | |
| | AGAACACCCAGGAGGTGTTCGCCCAGGTGAAGCAGATCTACAAGACCC | |
| | CCCCCATCAAGGACTTCGGCGGCTTCAACTTCAGCCAGATCCTGCCCG | |
| | ACCCCAGCAAGCCCAGCAAGAGGAGCTTCATCGAGGACCTGCTGTTCA | |
| | ACAAGGTGACCCTGGCCGACGCCGGCTTCATCAAGCAGTACGGCGACT | |
| | GCCTGGGCGACATCGCCGCCAGGGACCTGATCTGCGCCCAGAAGTTC | |
| | AACGGCCTGACCGTGCTGCCCCCCCTGCTGACCGACGAGATGATCGC | |
| | CCAGTACACCAGCGCCCTGCTGGCCGGCACCATCACCAGCGGCTGGA | |
| | CCTTCGGCGCCGGCGCCGCCCTGCAGATCCCCTTCGCCATGCAGATG | |
| | GCCTACAGGTTCAACGGCATCGGCGTGACCCAGAACGTGCTGTACGAG | |
| | AACCAGAAGCTGATCGCCAACCAGTTCAACAGCGCCATCGGCAAGATC | |
| | CAGGACAGCCTGAGCAGCACCGCCAGCGCCCTGGGCAAGCTGCAGGA | |
| | CGTGGTGAACCAGAACGCCCAGGCCCTGAACACCCTGGTGAAGCAGC | |
| | TGAGCAGCAACTTCGGCGCCATCAGCAGCGTGCTGAACGACATCCTGA | |
| | GCAGGCTGGACCCCCCCGAGGCCGAGGTGCAGATCGACAGGCTGATC | |
| | ACCGGCAGGCTGCAGAGCCTGCAGACCTACGTGACCCAGCAGCTGAT | |
| | CAGGGCCGCCGAGATCAGGGCCAGCGCCAACCTGGCCGCCACCAAGA | |
| | TGAGCGAGTGCGTGCTGGGCCAGAGCAAGAGGGTGGACTTCTGCGGC | |
| | AAGGGCTACCACCTGATGAGCTTCCCCCAGAGCGCCCCCCACGGCGT | |
| | GGTGTTCCTGCACGTGACCTACGTGCCCGCCCAGGAGAAGAACTTCAC | |
| | CACCGCCCCCGCCATCTGCCACGACGGCAAGGCCCACTTCCCCAGGG | |
| | AGGGCGTGTTCGTGAGCAACGGCACCCACTGGTTCGTGACCCAGAGG | |
| | AACTTCTACGAGCCCCAGATCATCACCACCGACAACACCTTCGTGAGC | |
| | GGCAACTGCGACGTGGTGATCGGCATCGTGAACAACACCGTGTACGAC | |
| | CCCCTGCAGCCCGAGCTGGACAGCTTCAAGGAGGAGCTGGACAAGTA | |
| | CTTCAAGAACCACACCAGCCCCGACGTGGACCTGGGCGACATCAGCG | |
| | GCATCAACGCCAGCGTGGTGAACATCCAGAAGGAGATCGACAGGCTGA | |
| | ACGAGGTGGCCAAGAACCTGAACGAGAGCCTGATCGACCTGCAGGAG | |
| | CTGGGCAAGTACGAGCAGTACATCAAGTGGCCCTGGTACATCTGGCTG | |
| | GGCTTCATCGCCGGCCTGATCGCCATCGTGATGGTGACCATCATGCTG | |
| | TGCTGCATGACCAGCTGCTGCAGCTGCCTGAAGGGCTGCTGCAGCTGC | |
| | GGCAGCTGCTGCAAGTTCGACGAGGACGACAGCGAGCCCGTGCTGAA | |
| | GGGCGTGAAGCTGCACTACACCTGATGACTCGAGCTGGTACTGCATGC | |
| | ACGCAATGCTAGCTGCCCCTTTCCCGTCCTGGGTACCCCGAGTCTCCC | |
| | CCGACCTCGGGTCCCAGGTATGCTCCCACCTCCACCTGCCCCACTCAC | |
| | CACCTCTGCTAGTTCCAGACACCTCCCAAGCACGCAGCAATGCAGCTC | |
| | AAAACGCTTAGCCTAGCCACACCCCCACGGGAAACAGCAGTGATTAAC | |
| | CTTTAGCAATAAACGAAAGTTTAACTAAGCTATACTAACCCCAGGGTTG | |
| | GTCAATTTCGTGCCAGCCACACCCTGGAGCTAGCAAAAAAAA | |
| 38 | TAGTTATTAATAGTAATCAATTACGGGGTCATTAGTTCATAGCCCATATA | 323 |
| Pan-CoV | TGGAGTTCCGCGTTACATAACTTACGGTAAATGGCCCGCCTGGCTGAC | |
| rAdv5-CMV- | CGCCCAACGACCCCCGCCCATTGACGTCAATAATGACGTATGTTCCCAT | |
| Nucleocapsid | AGTAACGCCAATAGGGACTTTCCATTGACGTCAATGGGTGGAGTATTTA | |
| | CGGTAAACTGCCCACTTGGCAGTACATCAAGTGTATCATATGCCAAGTA | |
| | CGCCCCCTATTGACGTCAATGACGGTAAATGGCCCGCCTGGCATTATG | |
| | CCCAGTACATGACCTTATGGGACTTTCCTACTTGGCAGTACATCTACGT | |
| | ATTAGTCATCGCTATTACCATGGTGATGCGGTTTTGGCAGTACATCAAT | |
| | GGGCGTGGATAGCGGTTTGACTCACGGGGATTTCCAAGTCTCCACCCC | |
| | ATTGACGTCAATGGGAGTTTGTTTTGGCACCAAAATCAACGGGACTTTC | |
| | CAAAATGTCGTAACAACTCCGCCCCATTGACGCAAATGGGCGGTAGGC | |
| | GTGTACGGTGGGAGGTCTATATAAGCAGAGCTGGTTTAGTGAACCGTC | |
| | AGATCGAGAATAAACTAGTATTCTTCTGGTCCCCACAGACTCAGAGAGA | |
| | ACCCGCCACCATGAGCGACAACGGCCCCCAGAACCAGAGGAACGCCC | |
| | CCAGGATCACCTTCGGCGGCCCCAGCGACAGCACCGGCAGCAACCAG | |
| | AACGGCGAGAGGAGCGGCGCCAGGAGCAAGCAGAGGAGGCCCCAGG | |
| | GCCTGCCCAACAACACCGCCAGCTGGTTCACCGCCCTGACCCAGCAC | |
| | GGCAAGGAGGACCTGAAGTTCCCCAGGGGCCAGGGCGTGCCCATCAA | |
| | CACCAACAGCAGCCCCGACGACCAGATCGGCTACTACAGGAGGGCCA | |
| | CCAGGAGGATCAGGGGCGGCGACGGCAAGATGAAGGACCTGAGCCCC | |
| | AGGTGGTACTTCTACTACCTGGGCACCGGCCCCGAGGCCGGCCTGCC | |
| | CTACGGCGCCAACAAGGACGGCATCATCTGGGTGGCCACCGAGGGCG | |
| | CCCTGAACACCCCCAAGGACCACATCGGCACCAGGAACCCCGCCAACA | |
| | ACGCCGCCATCGTGCTGCAGCTGCCCCAGGGCACCACCCTGCCCAAG | |
| | GGCTTCTACGCCGAGGGCAGCAGGGGCGGCAGCCAGGCCAGCAGCA | |
| | GGAGCAGCAGCAGGAGCAGGAACAGCAGCAGGAACAGCACCCCCGGC | |
| | AGCAGCAGGGGCACCAGCCCCGCCAGGATGGCCGGCAACGGCGGCG | |
| | ACGCCGCCCTGGCCCTGCTGCTGCTGGACAGGCTGAACCAGCTGGAG | |
| | AGCAAGATGAGCGGCAAGGGCCAGCAGCAGCAGGGCCAGACCGTGAC | |
| | CAAGAAGAGCGCCGCCGAGGCCAGCAAGAAGCCCAGGCAGAAGAGGA | |
| | CCGCCACCAAGGCCTACAACGTGACCCAGGCCTTCGGCAGGAGGGGC | |
| | CCCGAGCAGACCCAGGGCAACTTCGGCGACCAGGAGCTGATCAGGCA | |
| | GGGCACCGACTACAAGCACTGGCCCCAGATCGCCCAGTTCGCCCCCA | |
| | GCGCCAGCGCCTTCTTCGGCATGAGCAGGATCGGCATGGAGGTGACC | |
| | CCCAGCGGCACCTGGCTGACCTACACCGGCGCCATCAAGCTGGACGA | |
| | CAAGGACCCCAACTTCAAGGACCAGGTGATCCTGCTGAACAAGCACAT | |
| | CGACGCCTACAAGACCTTCCCCCCCACCGAGCCCAAGAAGGACAAGAA | |
| | GAAGAAGGCCGACGAGACCCAGGCCCTGCCCCAGAGGCAGAAGAAGC | |
| | AGCAGACCGTGACCCTGCTGCCCGCCGCCGACCTGGACGACTTCAGC | |
| | AAGCAGCTGCAGCAGAGCATGAGCAGCGCCGACAGCACCCAGGCCTG | |
| | ATGACTCGAGCTGGTACTGCATGCACGCAATGCTAGCTGCCCCTTTCC | |
| | CGTCCTGGGTACCCCGAGTCTCCCCCGACCTCGGGTCCCAGGTATGCT | |
| | CCCACCTCCACCTGCCCCACTCACCACCTCTGCTAGTTCCAGACACCT | |
| | CCCAAGCACGCAGCAATGCAGCTCAAAACGCTTAGCCTAGCCACACCC | |
| | CCACGGGAAACAGCAGTGATTAACCTTTAGCAATAAACGAAAGTTTAAC | |
| | TAAGCTATACTAACCCCAGGGTTGGTCAATTTCGTGCCAGCCACACCCT | |
| | GGAGCTAGCAAAAAAAA | |
| 39 | TAGTTATTAATAGTAATCAATTACGGGGTCATTAGTTCATAGCCCATATA | 324 |
| Pan-CoV | TGGAGTTCCGCGTTACATAACTTACGGTAAATGGCCCGCCTGGCTGAC | |
| rAdv5-CMV- | CGCCCAACGACCCCCGCCCATTGACGTCAATAATGACGTATGTTCCCAT | |
| ORF1a/b | AGTAACGCCAATAGGGACTTTCCATTGACGTCAATGGGTGGAGTATTTA | |
| | CGGTAAACTGCCCACTTGGCAGTACATCAAGTGTATCATATGCCAAGTA | |
| | CGCCCCCTATTGACGTCAATGACGGTAAATGGCCCGCCTGGCATTATG | |
| | CCCAGTACATGACCTTATGGGACTTTCCTACTTGGCAGTACATCTACGT | |
| | ATTAGTCATCGCTATTACCATGGTGATGCGGTTTTGGCAGTACATCAAT | |
| | GGGCGTGGATAGCGGTTTGACTCACGGGGATTTCCAAGTCTCCACCCC | |
| | ATTGACGTCAATGGGAGTTTGTTTTGGCACCAAAATCAACGGGACTTTC | |
| | CAAAATGTCGTAACAACTCCGCCCCATTGACGCAAATGGGCGGTAGGC | |
| | GTGTACGGTGGGAGGTCTATATAAGCAGAGCTGGTTTAGTGAACCGTC | |
| | AGATCGAGAATAAACTAGTATTCTTCTGGTCCCCACAGACTCAGAGAGA | |
| | ACCCGCCACCATGGACCAGGAACCCCGCCTGGAGGAAGGCCGTGTTC | |
| | ATCAGCCCCTACAACAGCCAGAACGCCGTGGCCAGCAAGATCCTGGGC | |
| | CTGCCCACCCAGACCGTGGACAGCAGCCAGGGCAGCGAGTACGACTA | |
| | CGTGATCTTCACCCAGACCACCGAGACCGCCCACAGCTGCAACGTGAA | |
| | CAGGTTCAACGTGGCCATCACCAGGGCCAAGGTGGGCATCCTGTGCAT | |
| | CATGAGCGACAGGGACCTGTACGACAAGCTGCAGTTCACCAGCCTGGA | |
| | GATCCCCAGGAGGAACGTGGCCACCCTGCAGGCCGAGAACGTGACCG | |
| | GCCTGTTCAAGGACTGCAGCAAGGTGATCACCGGCCTGCACCCCACCC | |
| | AGGCCCCCACCCACCTGAGCGTGGACACCAAGTTCAAGACCGAGGGC | |
| | CTGTGCGTGGACATCCCCGGCATCCCCAAGGACATGACCTACAGGAGG | |
| | CTGATCAGCATGATGGGCTTCAAGATGAACTACCAGGTGAACGGCTAC | |
| | CCCAACATGTTCATCACCAGGGAGGAGGCCATCAGGCACGTGAGGGC | |
| | CTGGATCGGCTTCGACGTGGAGGGCTGCCACGCCACCAGGGAGGCCG | |
| | TGGGCACCAACCTGCCCCTGCAGCTGGGCTTCAGCACCGGCGTGAAC | |
| | CTGGTGGCCGTGCCCACCGGCTACGTGGACACCCCCAACAACACCGA | |
| | CTTCAGCAGGGTGAGCGCCAAGCCCCCCCCCGGCGACCAGTTCAAGC | |
| | ACCTGATCCCCCTGATGTACAAGGGCCTGCCCTGGAACGTGGTGAGGA | |
| | TCAAGATCGTGCAGATGCTGAGCGACACCCTGAAGAACCTGAGCGACA | |
| | GGGTGGTGTTCGTGCTGTGGGCCCACGGCTTCGAGCTGACCAGCATG | |
| | AAGTACTTCGTGAAGATCGGCCCCGAGAGGACCTGCTGCCTGTGCGAC | |
| | AGGAGGGCCACCTGCTTCAGCACCGCCAGCGACACCTACGCCTGCTG | |
| | GCACCACAGCATCGGCTTCGACTACGTGTACAACCCCTTCATGATCGA | |
| | CGTGCAGCAGTGGGGCTTCACCGGCAACCTGCAGAGCAACCACGACC | |
| | TGTACTGCCAGGTGCACGGCAACGCCCACGTGGCCAGCTGCGACGCC | |
| | ATCATGACCAGGTGCCTGGCCGTGCACGAGTGCTTCGTGAAGAGGGTG | |
| | GACTGGACCATCGAGTACCCCATCATCGGCGACGAGCTGAAGATCAAC | |
| | GCCGCCTGCAGGAAGGTGCAGCACATGGTGGTGAAGGCCGCCCTGCT | |
| | GGCCGACAAGTTCCCCGTGCTGCACGACATCGGCAACCCCAAGGCCAT | |
| | CAAGTGCGTGCCCCAGGCCGACGTGGAGTGGAAGTTCTACGACGCCC | |
| | AGCCCTGCAGCGACAAGGCCTACAAGATCGAGGAGCTGTTCTACAGCT | |
| | ACGCCACCCACAGCGACAAGTTCACCGACGGCGTGTGCCTGTTCTGGA | |
| | ACTGCAACGTGGACAGGTACCCCGCCAACAGCATCGTGTGCAGGTTCG | |
| | ACACCAGGGTGCTGAGCAACCTGAACCTGCCCGGCTGCGACGGCGGC | |
| | AGCCTGTACGTGAACAAGCACGCCTTCCACACCCCCGCCTTCGACAAG | |
| | AGCGCCTTCGTGAACCTGAAGCAGCTGCCCTTCTTCTACTACAGCGAC | |
| | AGCCCCTGCGAGAGCCACGGCAAGCAGGTGGTGAGCGACATCGACTA | |
| | CGTGCCCCTGAAGAGCGCCACCTGCATCACCAGGTGCAACCTGGGCG | |
| | GCGCCGTGTGCAGGCACCACGCCAACGAGTACAGGCTGTACCTGGAC | |
| | GCCTACAACATGATGATCAGCGCCGGCTTCAGCCTGTGGGTGTACAAG | |
| | CAGTTCGACACCTACAACCTGTGGAACACCTTCACCAGGCTGCAGAGC | |
| | CTGGAGAACGTGGCCTTCAACGTGGTGAACAAGGGCCACTTCGACGGC | |
| | CAGCAGGGCGAGGTGCCCGTGAGCATCATCAACAACACCGTGTACACC | |
| | AAGGTGGACGGCGTGGACGTGGAGCTGTTCGAGAACAAGACCACCCT | |
| | GCCCGTGAACGTGGCCTTCGAGCTGTGGGCCAAGAGGAACATCAAGC | |
| | CCGTGCCCGAGGTGAAGATCCTGAACAACCTGGGCGTGGACATCGCC | |
| | GCCAACACCGTGATCTGGGACTACAAGAGGGACGCCCCCGCCCACAT | |
| | CAGCACCATCGGCGTGTGCAGCATGACCGACATCGCCAAGAAGCCCAC | |
| | CGAGACCATCTGCGCCCCCCTGACCGTGTTCTTCGACGGCAGGGTGG | |
| | ACGGCCAGGTGGACCTGTTCAGGAACGCCAGGAACGGCGTGCTGATC | |
| | ACCGAGGGCAGCGTGAAGGGCCTGCAGCCCAGCGTGGGCCCCAAGCA | |
| | GGCCAGCCTGAACGGCGTGACCCTGATCGGCGAGGCCGTGAAGACCC | |
| | AGTTCAACTACTACAAGAAGGTGGACGGCGTGGTGCAGCAGCTGCCCG | |
| | AGACCTACTTCACCCAGAGCAGGAACCTGCAGGAGTTCAAGCCCAGGA | |
| | GCCAGATGGAGATCGACTTCCTGGAGCTGGCCATGGACGAGTTCATCG | |
| | AGAGGTACAAGCTGGAGGGCTACGCCTTCGAGCACATCGTGTACGGC | |
| | GACTTCAGCCACAGCCAGCTGGGCGGCCTGCACCTGCTGATCGGCCT | |
| | GGCCAAGAGGTTCAAGGAGAGCCCCTTCGAGCTGGAGGACTTCATCCC | |
| | CATGGACAGCACCGTGAAGAACTACTTCATCACCGACGCCCAGACCGG | |
| | CAGCAGCAAGTGCGTGTGCAGCGTGATCGACCTGCTGCTGGACGACTT | |
| | CGTGGAGATCATCAAGAGCCAGGACCTGAGCGTGGTGAGCAAGGTGG | |
| | TGAAGGTGACCATCGACTACACCGAGATCAGCTTCATGCTGTGGTGCA | |
| | AGGACGGCCACGTGGAGACCTTCTACCCCAAGCTGCAGAGCAGCCAG | |
| | GCCTGGCAGCCCGGCGTGGCCATGCCCAACCTGTACAAGATGCAGAG | |
| | GATGCTGCTGGAGAAGTGCGACCTGCAGAACTACGGCGACAGCGCCA | |
| | CCCTGCCCAAGGGCATCATGATGAACGTGGCCAAGTACACCCAGCTGT | |
| | GCCAGTACCTGAACACCCTGACCCTGGCCGTGCCCTACAACATGAGGG | |
| | TGATCCACTTCGGCGCCGGCAGCGACAAGGGCGTGGCCCCCGGCACC | |
| | GCCGTGCTGAGGCAGTGGCTGCCCACCGGCACCCTGCTGGTGGACAG | |
| | CGACCTGAACGACTTCGTGAGCGACGCCGACAGCACCCTGATCGGCG | |
| | ACTGCGCCACCGTGCACACCGCCAACAAGTGGGACCTGATCATCAGCG | |
| | ACATGTACGACCCCAAGACCAAGAACGTGACCAAGGAGAACGACAGCA | |
| | AGGAGGGCTTCTTCACCTACATCTGCGGCTTCATCCAGCAGAAGCTGG | |
| | CCCTGGGCGGCAGCGTGGCCATCAAGATCACCGAGCACAGCTGGAAC | |
| | GCCGACCTGTACAAGCTGATGGGCCACTTCGCCTGGTGGACCGCCTTC | |
| | GTGACCAACGTGAACGCCAGCAGCAGCGAGGCCTTCCTGATCGGCTG | |
| | CAACTACCTGGGCAAGCCCAGGGAGCAGATCGACGGCTACGTGATGC | |
| | ACGCCAACTACATCTTCTGGAGGAACACCAACCCCATCCAGCTGAGCA | |
| | GCTACAGCCTGTTCGACATGAGCAAGTTCCCCCTGAAGCTTGATGACTC | |
| | GAGCTGGTACTGCATGCACGCAATGCTAGCTGCCCCTTTCCCGTCCTG | |
| | GGTACCCCGAGTCTCCCCCGACCTCGGGTCCCAGGTATGCTCCCACCT | |
| | CCACCTGCCCCACTCACCACCTCTGCTAGTTCCAGACACCTCCCAAGC | |
| | ACGCAGCAATGCAGCTCAAAACGCTTAGCCTAGCCACACCCCCACGGG | |
| | AAACAGCAGTGATTAACCTTTAGCAATAAACGAAAGTTTAACTAAGCTAT | |
| | ACTAACCCCAGGGTTGGTCAATTTCGTGCCAGCCACACCCTGGAGCTA | |
| | GCAAAAAAAA | |
| 40 | TAGTTATTAATAGTAATCAATTACGGGGTCATTAGTTCATAGCCCATATA | 325 |
| Pan-CoV | TGGAGTTCCGCGTTACATAACTTACGGTAAATGGCCCGCCTGGCTGAC | |
| rAdv5-CMV- | CGCCCAACGACCCCCGCCCATTGACGTCAATAATGACGTATGTTCCCAT | |
| Envelope | AGTAACGCCAATAGGGACTTTCCATTGACGTCAATGGGTGGAGTATTTA | |
| | CGGTAAACTGCCCACTTGGCAGTACATCAAGTGTATCATATGCCAAGTA | |
| | CGCCCCCTATTGACGTCAATGACGGTAAATGGCCCGCCTGGCATTATG | |
| | CCCAGTACATGACCTTATGGGACTTTCCTACTTGGCAGTACATCTACGT | |
| | ATTAGTCATCGCTATTACCATGGTGATGCGGTTTTGGCAGTACATCAAT | |
| | GGGCGTGGATAGCGGTTTGACTCACGGGGATTTCCAAGTCTCCACCCC | |
| | ATTGACGTCAATGGGAGTTTGTTTTGGCACCAAAATCAACGGGACTTTC | |
| | CAAAATGTCGTAACAACTCCGCCCCATTGACGCAAATGGGCGGTAGGC | |
| | GTGTACGGTGGGAGGTCTATATAAGCAGAGCTGGTTTAGTGAACCGTC | |
| | AGATCGAGAATAAACTAGTATTCTTCTGGTCCCCACAGACTCAGAGAGA | |
| | ACCCGCCACCATGTACAGCTTCGTGAGCGAGGAGACCGGCACCCTGAT | |
| | CGTGAACAGCGTGCTGCTGTTCCTGGCCTTCGTGGTGTTCCTGCTGGT | |
| | GACCCTGGCCATCCTGACCGCCCTGAGGCTGTGCGCCTACTGCTGCAA | |
| | CATCGTGAACGTGAGCCTGGTGAAGCCCAGCTTCTACGTGTACAGCAG | |
| | GGTGAAGAACCTGAACAGCAGCAGGGTGCCCGACCTGCTGGTGTGAT | |
| | GACTCGAGCTGGTACTGCATGCACGCAATGCTAGCTGCCCCTTTCCCG | |
| | TCCTGGGTACCCCGAGTCTCCCCCGACCTCGGGTCCCAGGTATGCTCC | |
| | CACCTCCACCTGCCCCACTCACCACCTCTGCTAGTTCCAGACACCTCC | |
| | CAAGCACGCAGCAATGCAGCTCAAAACGCTTAGCCTAGCCACACCCCC | |
| | ACGGGAAACAGCAGTGATTAACCTTTAGCAATAAACGAAAGTTTAACTA | |
| | AGCTATACTAACCCCAGGGTTGGTCAATTTCGTGCCAGCCACACCCTG | |
| | GAGCTAGCAAAAAAAA | |
| 41 | TAGTTATTAATAGTAATCAATTACGGGGTCATTAGTTCATAGCCCATATA | 326 |
| Pan-CoV | TGGAGTTCCGCGTTACATAACTTACGGTAAATGGCCCGCCTGGCTGAC | |
| rAdv5-CMV- | CGCCCAACGACCCCCGCCCATTGACGTCAATAATGACGTATGTTCCCAT | |
| Membrane | AGTAACGCCAATAGGGACTTTCCATTGACGTCAATGGGTGGAGTATTTA | |
| | CGGTAAACTGCCCACTTGGCAGTACATCAAGTGTATCATATGCCAAGTA | |
| | CGCCCCCTATTGACGTCAATGACGGTAAATGGCCCGCCTGGCATTATG | |
| | CCCAGTACATGACCTTATGGGACTTTCCTACTTGGCAGTACATCTACGT | |
| | ATTAGTCATCGCTATTACCATGGTGATGCGGTTTTGGCAGTACATCAAT | |
| | GGGCGTGGATAGCGGTTTGACTCACGGGGATTTCCAAGTCTCCACCCC | |
| | ATTGACGTCAATGGGAGTTTGTTTTGGCACCAAAATCAACGGGACTTTC | |
| | CAAAATGTCGTAACAACTCCGCCCCATTGACGCAAATGGGCGGTAGGC | |
| | GTGTACGGTGGGAGGTCTATATAAGCAGAGCTGGTTTAGTGAACCGTC | |
| | AGATCGAGAATAAACTAGTATTCTTCTGGTCCCCACAGACTCAGAGAGA | |
| | ACCCGCCACCATGGCCGACAGCAACGGCACCATCACCGTGGAGGAGC | |
| | TGAAGAAGCTGCTGGAGCAGTGGAACCTGGTGATCGGCTTCCTGTTCC | |
| | TGACCTGGATCTGCCTGCTGCAGTTCGCCTACGCCAACAGGAACAGGT | |
| | TCCTGTACATCATCAAGCTGATCTTCCTGTGGCTGCTGTGGCCCGTGAC | |
| | CCTGGCCTGCTTCGTGCTGGCCGCCGTGTACAGGATCAACTGGATCAC | |
| | CGGCGGCATCGCCATCGCCATGGCCTGCCTGGTGGGCCTGATGTGGC | |
| | TGAGCTACTTCATCGCCAGCTTCAGGCTGTTCGCCAGGACCAGGAGCA | |
| | TGTGGAGCTTCAACCCCGAGACCAACATCCTGCTGAACGTGCCCCTGC | |
| | ACGGCACCATCCTGACCAGGCCCCTGCTGGAGAGCGAGCTGGTGATC | |
| | GGCGCCGTGATCCTGAGGGGCCACCTGAGGATCGCCGGCCACCACCT | |
| | GGGCAGGTGCGACATCAAGGACCTGCCCAAGGAGATCACCGTGGCCA | |
| | CCAGCAGGACCCTGAGCTACTACAAGCTGGGCGCCAGCCAGAGGGTG | |
| | GCCGGCGACAGCGGCTTCGCCGCCTACAGCAGGTACAGGATCGGCAA | |
| | CTACAAGCTGAACACCGACCACAGCAGCAGCAGCGACAACATCGCCCT | |
| | GCTGGTGCAGTGATGACTCGAGCTGGTACTGCATGCACGCAATGCTAG | |
| | CTGCCCCTTTCCCGTCCTGGGTACCCCGAGTCTCCCCCGACCTCGGGT | |
| | CCCAGGTATGCTCCCACCTCCACCTGCCCCACTCACCACCTCTGCTAG | |
| | TTCCAGACACCTCCCAAGCACGCAGCAATGCAGCTCAAAACGCTTAGC | |
| | CTAGCCACACCCCCACGGGAAACAGCAGTGATTAACCTTTAGCAATAAA | |
| | CGAAAGTTTAACTAAGCTATACTAACCCCAGGGTTGGTCAATTTCGTGC | |
| | CAGCCACACCCTGGAGCTAGCAAAAAAAA | |
| 42 | TAGTTATTAATAGTAATCAATTACGGGGTCATTAGTTCATAGCCCATATA | 327 |
| Pan-CoV | TGGAGTTCCGCGTTACATAACTTACGGTAAATGGCCCGCCTGGCTGAC | |
| rAdv5-CMV- | CGCCCAACGACCCCCGCCCATTGACGTCAATAATGACGTATGTTCCCAT | |
| ORF7a | AGTAACGCCAATAGGGACTTTCCATTGACGTCAATGGGTGGAGTATTTA | |
| | CGGTAAACTGCCCACTTGGCAGTACATCAAGTGTATCATATGCCAAGTA | |
| | CGCCCCCTATTGACGTCAATGACGGTAAATGGCCCGCCTGGCATTATG | |
| | CCCAGTACATGACCTTATGGGACTTTCCTACTTGGCAGTACATCTACGT | |
| | ATTAGTCATCGCTATTACCATGGTGATGCGGTTTTGGCAGTACATCAAT | |
| | GGGCGTGGATAGCGGTTTGACTCACGGGGATTTCCAAGTCTCCACCCC | |
| | ATTGACGTCAATGGGAGTTTGTTTTGGCACCAAAATCAACGGGACTTTC | |
| | CAAAATGTCGTAACAACTCCGCCCCATTGACGCAAATGGGCGGTAGGC | |
| | GTGTACGGTGGGAGGTCTATATAAGCAGAGCTGGTTTAGTGAACCGTC | |
| | AGATCGAGAATAAACTAGTATTCTTCTGGTCCCCACAGACTCAGAGAGA | |
| | ACCCGCCACCATGAAGATCATCCTGTTCCTGGCCCTGATCACCCTGGC | |
| | CACCTGCGAGCTGTACCACTACCAGGAGTGCGTGAGGGGCACCACCG | |
| | TGTGATGACTCGAGCTGGTACTGCATGCACGCAATGCTAGCTGCCCCT | |
| | TTCCCGTCCTGGGTACCCCGAGTCTCCCCCGACCTCGGGTCCCAGGTA | |
| | TGCTCCCACCTCCACCTGCCCCACTCACCACCTCTGCTAGTTCCAGACA | |
| | CCTCCCAAGCACGCAGCAATGCAGCTCAAAACGCTTAGCCTAGCCACA | |
| | CCCCCACGGGAAACAGCAGTGATTAACCTTTAGCAATAAACGAAAGTTT | |
| | AACTAAGCTATACTAACCCCAGGGTTGGTCAATTTCGTGCCAGCCACAC | |
| | CCTGGAGCTAGCAAAAAAAA | |
| 43 | TAGTTATTAATAGTAATCAATTACGGGGTCATTAGTTCATAGCCCATATA | 328 |
| Pan-CoV | TGGAGTTCCGCGTTACATAACTTACGGTAAATGGCCCGCCTGGCTGAC | |
| rAdv5-CMV- | CGCCCAACGACCCCCGCCCATTGACGTCAATAATGACGTATGTTCCCAT | |
| NSP3 | AGTAACGCCAATAGGGACTTTCCATTGACGTCAATGGGTGGAGTATTTA | |
| | CGGTAAACTGCCCACTTGGCAGTACATCAAGTGTATCATATGCCAAGTA | |
| | CGCCCCCTATTGACGTCAATGACGGTAAATGGCCCGCCTGGCATTATG | |
| | CCCAGTACATGACCTTATGGGACTTTCCTACTTGGCAGTACATCTACGT | |
| | ATTAGTCATCGCTATTACCATGGTGATGCGGTTTTGGCAGTACATCAAT | |
| | GGGCGTGGATAGCGGTTTGACTCACGGGGATTTCCAAGTCTCCACCCC | |
| | ATTGACGTCAATGGGAGTTTGTTTTGGCACCAAAATCAACGGGACTTTC | |
| | CAAAATGTCGTAACAACTCCGCCCCATTGACGCAAATGGGCGGTAGGC | |
| | GTGTACGGTGGGAGGTCTATATAAGCAGAGCTGGTTTAGTGAACCGTC | |
| | AGATCGAGAATAAACTAGTATTCTTCTGGTCCCCACAGACTCAGAGAGA | |
| | ACCCGCCACCATGGCCCCCACCAAGGTGACCTTCGGCGACGACACCG | |
| | TGATCGAGGTGCAGGGCTACAAGAGCGTGAACATCACCTTCGAGCTGG | |
| | ACGAGAGGATCGACAAGGTGCTGAACGAGAAGTGCAGCGCCTACACC | |
| | GTGGAGCTGGGCACCGAGGTGAACGAGTTCGCCTGCGTGGTGGCCGA | |
| | CGCCGTGATCAAGACCCTGCAGCCCGTGAGCGAGCTGCTGACCCCCC | |
| | TGGGCATCGACCTGGACGAGTGGAGCATGGCCACCTACTACCTGTTCG | |
| | ACGAGAGCGGCGAGTTCAAGCTGGCCAGCCACATGTACTGCAGCTTCT | |
| | ACCCCCCCGACGAGGACGAGGAGGAGGGCGACTGCGAGGAGGAGGA | |
| | GTTCGAGCCCAGCACCCAGTACGAGTACGGCACCGAGGACGACTACC | |
| | AGGGCAAGCCCCTGGAGTTCGGCGCCACCAGCGCCGCCCTGCAGCCC | |
| | GAGGAGGAGCAGGAGGAGGACTGGCTGGACGACGACAGCCAGCAGA | |
| | CCGTGGGCCAGCAGGACGGCAGCGAGGACAACCAGACCACCACCATC | |
| | CAGACCATCGTGGAGGTGCAGCCCCAGCTGGAGATGGAGCTGACCCC | |
| | CGTGGTGCAGACCATCGAGGTGAACAGCTTCAGCGGCTACCTGAAGCT | |
| | GACCGACAACGTGTACATCAAGAACGCCGACATCGTGGAGGAGGCCAA | |
| | GAAGGTGAAGCCCACCGTGGTGGTGAACGCCGCCAACGTGTACCTGA | |
| | AGCACGGCGGCGGCGTGGCCGGCGCCCTGAACAAGGCCACCAACAAC | |
| | GCCATGCAGGTGGAGAGCGACGACTACATCGCCACCAACGGCCCCCT | |
| | GAAGGTGGGCGGCAGCTGCGTGCTGAGCGGCCACAACCTGGCCAAGC | |
| | ACTGCCTGCACGTGGTGGGCCCCAACGTGAACAAGGGCGAGGACATC | |
| | CAGCTGCTGAAGAGCGCCTACGAGAACTTCAACCAGCACGAGGTGCTG | |
| | CTGGCCCCCCTGCTGAGCGCCGGCATCTTCGGCGCCGACCCCATCCA | |
| | CAGCCTGAGGGTGTGCGTGGACACCGTGAGGACCAACGTGTACCTGG | |
| | CCGTGTTCGACAAGAACCTGTACGACAAGCTGGTGAGCAGCTTCCTGG | |
| | AGATGAAGAGCGAGAAGCAGGTGGAGCAGAAGATCGCCGAGATCCCC | |
| | AAGGAGGAGGTGAAGCCCTTCATCACCGAGAGCAAGCCCAGCGTGGA | |
| | GCAGAGGAAGCAGGACGACAAGAAGATCAAGGCCTGCGTGGAGGAGG | |
| | TGACCACCACCCTGGAGGAGACCAAGTTCCTGACCGAGAACCTGCTGC | |
| | TGTACATCGACATCAACGGCAACCTGCACCCCGACAGCGCCACCCTGG | |
| | TGAGCGACATCGACATCACCTTCCTGAAGAAGGACGCCCCCTACATCG | |
| | TGGGCGACGTGGTGCAGGAGGGCGTGCTGACCGCCGTGGTGATCCCC | |
| | ACCAAGAAGGCCGGCGGCACCACCGAGATGCTGGCCAAGGCCCTGAG | |
| | GAAGGTGCCCACCGACAACTACATCACCACCTACCCCGGCCAGGGCCT | |
| | GAACGGCTACACCGTGGAGGAGGCCAAGACCGTGCTGAAGAAGTGCA | |
| | AGAGCGCCTTCTACATCCTGCCCAGCATCATCAGCAACGAGAAGCAGG | |
| | AGATCCTGGGCACCGTGAGCTGGAACCTGAGGGAGATGCTGGCCCAC | |
| | GCCGAGGAGACCAGGAAGCTGATGCCCGTGTGCGTGGAGACCAAGGC | |
| | CATCGTGAGCACCATCCAGAGGAAGTACAAGGGCATCAAGATCCAGGA | |
| | GGGCGTGGTGGACTACGGCGCCAGGTTCTACTTCTACACCAGCAAGAC | |
| | CACCGTGGCCAGCCTGATCAACACCCTGAACGACCTGAACGAGACCCT | |
| | GGTGACCATGCCCCTGGGCTACGTGACCCACGGCCTGAACCTGGAGG | |
| | AGGCCGCCAGGTACATGAGGAGCCTGAAGGTGCCCGCCACCGTGAGC | |
| | GTGAGCAGCCCCGACGCCGTGACCGCCTACAACGGCTACCTGACCAG | |
| | CAGCAGCAAGACCCCCGAGGAGCACTTCATCGAGACCATCAGCCTGGC | |
| | CGGCAGCTACAAGGACTGGAGCTACAGCGGCCAGAGCACCCAGCTGG | |
| | GCATCGAGTTCCTGAAGAGGGGCGACAAGAGCGTGTACTACACCAGCA | |
| | ACCCCACCACCTTCCACCTGGACGGCGAGGTGATCACCTTCGACAACC | |
| | TGAAGACCCTGCTGAGCCTGAGGGAGGTGAGGACCATCAAGGTGTTCA | |
| | CCACCGTGGACAACATCAACCTGCACTGATGACTCGAGCTGGTACTGC | |
| | ATGCACGCAATGCTAGCTGCCCCTTTCCCGTCCTGGGTACCCCGAGTC | |
| | TCCCCCGACCTCGGGTCCCAGGTATGCTCCCACCTCCACCTGCCCCAC | |
| | TCACCACCTCTGCTAGTTCCAGACACCTCCCAAGCACGCAGCAATGCA | |
| | GCTCAAAACGCTTAGCCTAGCCACACCCCCACGGGAAACAGCAGTGAT | |
| | TAACCTTTAGCAATAAACGAAAGTTTAACTAAGCTATACTAACCCCAGGG | |
| | TTGGTCAATTTCGTGCCAGCCACACCCTGGAGCTAGCAAAAAAAA | |
| 44 | TAGTTATTAATAGTAATCAATTACGGGGTCATTAGTTCATAGCCCATATA | 329 |
| Pan-CoV | TGGAGTTCCGCGTTACATAACTTACGGTAAATGGCCCGCCTGGCTGAC | |
| rAdv5-CMV- | CGCCCAACGACCCCCGCCCATTGACGTCAATAATGACGTATGTTCCCAT | |
| NSP5 | AGTAACGCCAATAGGGACTTTCCATTGACGTCAATGGGTGGAGTATTTA | |
| | CGGTAAACTGCCCACTTGGCAGTACATCAAGTGTATCATATGCCAAGTA | |
| | CGCCCCCTATTGACGTCAATGACGGTAAATGGCCCGCCTGGCATTATG | |
| | CCCAGTACATGACCTTATGGGACTTTCCTACTTGGCAGTACATCTACGT | |
| | ATTAGTCATCGCTATTACCATGGTGATGCGGTTTTGGCAGTACATCAAT | |
| | GGGCGTGGATAGCGGTTTGACTCACGGGGATTTCCAAGTCTCCACCCC | |
| | ATTGACGTCAATGGGAGTTTGTTTTGGCACCAAAATCAACGGGACTTTC | |
| | CAAAATGTCGTAACAACTCCGCCCCATTGACGCAAATGGGCGGTAGGC | |
| | GTGTACGGTGGGAGGTCTATATAAGCAGAGCTGGTTTAGTGAACCGTC | |
| | AGATCGAGAATAAACTAGTATTCTTCTGGTCCCCACAGACTCAGAGAGA | |
| | ACCCGCCACCATGAGCGGCTTCAGGAAGATGGCCTTCCCCAGCGGCA | |
| | AGGTGGAGGGCTGCATGGTGCAGGTGACCTGCGGCACCACCACCCTG | |
| | AACGGCCTGTGGCTGGACGACGTGGTGTACTGCCCCAGGCACGTGAT | |
| | CTGCACCAGCGAGGACATGCTGAACCCCAACTACGAGGACCTGCTGAT | |
| | CAGGAAGAGCAACCACAACTTCCTGGTGCAGGCCGGCAACGTGCAGCT | |
| | GAGGGTGATCGGCCACAGCATGCAGAACTGCGTGCTGAAGCTGAAGG | |
| | TGGACACCGCCAACCCCAAGACCCCCAAGTACAAGTTCGTGAGGATCC | |
| | AGCCCGGCCAGACCTTCAGCGTGCTGGCCTGCTACAACGGCAGCCCC | |
| | AGCGGCGTGTACCAGTGCGCCATGAGGCCCAACTTCACCATCAAGGGC | |
| | AGCTTCCTGAACGGCAGCTGCGGCAGCGTGGGCTTCAACATCGACTAC | |
| | GACTGCGTGAGCTTCTGCTACATGCACCACATGGAGCTGCCCACCGGC | |
| | GTGCACGCCGGCACCGACCTGGAGGGCAACTTCTACGGCCCCTTCGT | |
| | GGACAGGCAGACCGCCCAGGCCGCCGGCACCGACACCACCATCACCG | |
| | TGAACGTGCTGGCCTGGCTGTACGCCGCCGTGATCAACGGCGACAGG | |
| | TGGTTCCTGAACAGGTTCACCACCACCCTGAACGACTTCAACCTGGTG | |
| | GCCATGAAGTACAACTACGAGCCCCTGACCCAGGACCACGTGGACATC | |
| | CTGGGCCCCCTGAGCGCCCAGACCGGCATCGCCGTGCTGGACATGTG | |
| | CGCCAGCCTGAAGGAGCTGCTGCAGAACGGCATGAACGGCAGGACCA | |
| | TCCTGGGCAGCGCCCTGCTGGAGGACGAGTTCACCCCCTTCGACGTG | |
| | GTGAGGCAGTGCAGCGGCGTGACCTTCCAGTGATGACTCGAGCTGGTA | |
| | CTGCATGCACGCAATGCTAGCTGCCCCTTTCCCGTCCTGGGTACCCCG | |
| | AGTCTCCCCCGACCTCGGGTCCCAGGTATGCTCCCACCTCCACCTGCC | |
| | CCACTCACCACCTCTGCTAGTTCCAGACACCTCCCAAGCACGCAGCAA | |
| | TGCAGCTCAAAACGCTTAGCCTAGCCACACCCCCACGGGAAACAGCAG | |
| | TGATTAACCTTTAGCAATAAACGAAAGTTTAACTAAGCTATACTAACCCC | |
| | AGGGTTGGTCAATTTCGTGCCAGCCACACCCTGGAGCTAGCAAAAAAA | |
| | A | |
| 45 | TAGTTATTAATAGTAATCAATTACGGGGTCATTAGTTCATAGCCCATATA | 330 |
| Pan-CoV | TGGAGTTCCGCGTTACATAACTTACGGTAAATGGCCCGCCTGGCTGAC | |
| rAdv5-CMV- | CGCCCAACGACCCCCGCCCATTGACGTCAATAATGACGTATGTTCCCAT | |
| NSP12 | AGTAACGCCAATAGGGACTTTCCATTGACGTCAATGGGTGGAGTATTTA | |
| | CGGTAAACTGCCCACTTGGCAGTACATCAAGTGTATCATATGCCAAGTA | |
| | CGCCCCCTATTGACGTCAATGACGGTAAATGGCCCGCCTGGCATTATG | |
| | CCCAGTACATGACCTTATGGGACTTTCCTACTTGGCAGTACATCTACGT | |
| | ATTAGTCATCGCTATTACCATGGTGATGCGGTTTTGGCAGTACATCAAT | |
| | GGGCGTGGATAGCGGTTTGACTCACGGGGATTTCCAAGTCTCCACCCC | |
| | ATTGACGTCAATGGGAGTTTGTTTTGGCACCAAAATCAACGGGACTTTC | |
| | CAAAATGTCGTAACAACTCCGCCCCATTGACGCAAATGGGCGGTAGGC | |
| | GTGTACGGTGGGAGGTCTATATAAGCAGAGCTGGTTTAGTGAACCGTC | |
| | AGATCGAGAATAAACTAGTATTCTTCTGGTCCCCACAGACTCAGAGAGA | |
| | ACCCGCCACCATGAGCGCCGACGCCCAGAGCTTCCTGAACAGGGTGT | |
| | GCGGCGTGAGCGCCGCCAGGCTGACCCCCTGCGGCACCGGCACCAG | |
| | CACCGACGTGGTGTACAGGGCCTTCGACATCTACAACGACAAGGTGGC | |
| | CGGCTTCGCCAAGTTCCTGAAGACCAACTGCTGCAGGTTCCAGGAGAA | |
| | GGACGAGGACGACAACCTGATCGACAGCTACTTCGTGGTGAAGAGGCA | |
| | CACCTTCAGCAACTACCAGCACGAGGAGACCATCTACAACCTGCTGAA | |
| | GGACTGCCCCGCCGTGGCCAAGCACGACTTCTTCAAGTTCAGGATCGA | |
| | CGGCGACATGGTGCCCCACATCAGCAGGCAGAGGCTGACCAAGTACA | |
| | CCATGGCCGACCTGGTGTACGCCCTGAGGCACTTCGACGAGGGCAAC | |
| | TGCGACACCCTGAAGGAGATCCTGGTGACCTACAACTGCTGCGACGAC | |
| | GACTACTTCAACAAGAAGGACTGGTACGACTTCGTGGAGAACCCCGAC | |
| | ATCCTGAGGGTGTACGCCAACCTGGGCGAGAGGGTGAGGCAGGCCCT | |
| | GCTGAAGACCGTGCAGTTCTGCGACGCCATGAGGAACGCCGGCATCG | |
| | TGGGCGTGCTGACCCTGGACAACCAGGACCTGAACGGCAACTGGTAC | |
| | GACTTCGGCGACTTCATCCAGACCACCCCCGGCAGCGGCGTGCCCGT | |
| | GGTGGACAGCTACTACAGCCTGCTGATGCCCATCCTGACCCTGACCAG | |
| | GGCCCTGACCGCCGAGAGCCACGTGGACACCGACCTGACCAAGCCCT | |
| | ACATCAAGTGGGACCTGCTGAAGTACGACTTCACCGAGGAGAGGCTGA | |
| | AGCTGTTCGACAGGTACTTCAAGTACTGGGACCAGACCTACCACCCCA | |
| | ACTGCGTGAACTGCCTGGACGACAGGTGCATCCTGCACTGCGCCAACT | |
| | TCAACGTGCTGTTCAGCACCGTGTTCCCCCCCACCAGCTTCGGCCCCC | |
| | TGGTGAGGAAGATCTTCGTGGACGGCGTGCCCTTCGTGGTGAGCACC | |
| | GGCTACCACTTCAGGGAGCTGGGCGTGGTGCACAACCAGGACGTGAA | |
| | CCTGCACAGCAGCAGGCTGAGCTTCAAGGAGCTGCTGGTGTACGCCG | |
| | CCGACCCCGCCATGCACGCCGCCAGCGGCAACCTGCTGCTGGACAAG | |
| | AGGACCACCTGCTTCAGCGTGGCCGCCCTGACCAACAACGTGGCCTTC | |
| | CAGACCGTGAAGCCCGGCAACTTCAACAAGGACTTCTACGACTTCGCC | |
| | GTGAGCAAGGGCTTCTTCAAGGAGGGCAGCAGCGTGGAGCTGAAGCA | |
| | CTTCTTCTTCGCCCAGGACGGCAACGCCGCCATCAGCGACTACGACTA | |
| | CTACAGGTACAACCTGCCCACCATGTGCGACATCAGGCAGCTGCTGTT | |
| | CGTGGTGGAGGTGGTGGACAAGTACTTCGACTGCTACGACGGCGGCT | |
| | GCATCAACGCCAACCAGGTGATCGTGAACAACCTGGACAAGAGCGCCG | |
| | GCTTCCCCTTCAACAAGTGGGGCAAGGCCAGGCTGTACTACGACAGCA | |
| | TGAGCTACGAGGACCAGGACGCCCTGTTCGCCTACACCAAGAGGAACG | |
| | TGATCCCCACCATCACCCAGATGAACCTGAAGTACGCCATCAGCGCCA | |
| | AGAACAGGGCCAGGACCGTGGCCGGCGTGAGCATCTGCAGCACCATG | |
| | ACCAACAGGCAGTTCCACCAGAAGCTGCTGAAGAGCATCGCCGCCACC | |
| | AGGGGCGCCACCGTGGTGATCGGCACCAGCAAGTTCTACGGCGGCTG | |
| | GCACAACATGCTGAAGACCGTGTACAGCGACGTGGAGAACCCCCACCT | |
| | GATGGGCTGGGACTACCCCAAGTGCGACAGGGCCATGCCCAACATGC | |
| | TGAGGATCATGGCCAGCCTGGTGCTGGCCAGGAAGCACACCACCTGCT | |
| | GCAGCCTGAGCCACAGGTTCTACAGGCTGGCCAACGAGTGCGCCCAG | |
| | GTGCTGAGCGAGATGGTGATGTGCGGCGGCAGCCTGTACGTGAAGCC | |
| | CGGCGGCACCAGCAGCGGCGACGCCACCACCGCCTACGCCAACAGCG | |
| | TGTTCAACATCTGCCAGGCCGTGACCGCCAACGTGAACGCCCTGCTGA | |
| | GCACCGACGGCAACAAGATCGCCGACAAGTACGTGAGGAACCTGCAG | |
| | CACAGGCTGTACGAGTGCCTGTACAGGAACAGGGACGTGGACACCGA | |
| | CTTCGTGAACGAGTTCTACGCCTACCTGAGGAAGCACTTCAGCATGATG | |
| | ATCCTGAGCGACGACGCCGTGGTGTGCTTCAACAGCACCTACGCCAGC | |
| | CAGGGCCTGGTGGCCAGCATCAAGAACTTCAAGAGCGTGCTGTACTAC | |
| | CAGAACAACGTGTTCATGAGCGAGGCCAAGTGCTGGACCGAGACCGAC | |
| | CTGACCAAGGGCCCCCACGAGTTCTGCAGCCAGCACACCATGCTGGTG | |
| | AAGCAGGGCGACGACTACGTGTACCTGCCCTACCCCGACCCCAGCAG | |
| | GATCCTGGGCGCCGGCTGCTTCGTGGACGACATCGTGAAGACCGACG | |
| | GCACCCTGATGATCGAGAGGTTCGTGAGCCTGGCCATCGACGCCTACC | |
| | CCCTGACCAAGCACCCCAACCAGGAGTACGCCGACGTGTTCCACCTGT | |
| | ACCTGCAGTACATCAGGAAGCTGCACGACGAGCTGACCGGCCACATGC | |
| | TGGACATGTACAGCGTGATGCTGACCAACGACAACACCAGCAGGTACT | |
| | GGGAGCCCGAGTTCTACGAGGCCATGTACACCCCCCACACCGTGCTG | |
| | CAGTGATGACTCGAGCTGGTACTGCATGCACGCAATGCTAGCTGCCCC | |
| | TTTCCCGTCCTGGGTACCCCGAGTCTCCCCCGACCTCGGGTCCCAGGT | |
| | ATGCTCCCACCTCCACCTGCCCCACTCACCACCTCTGCTAGTTCCAGAC | |
| | ACCTCCCAAGCACGCAGCAATGCAGCTCAAAACGCTTAGCCTAGCCAC | |
| | ACCCCCACGGGAAACAGCAGTGATTAACCTTTAGCAATAAACGAAAGTT | |
| | TAACTAAGCTATACTAACCCCAGGGTTGGTCAATTTCGTGCCAGCCACA | |
| | CCCTGGAGCTAGCAAAAAAAA | |
| 46 | CTCGACATTGATTATTGACTAGTTATTAATAGTAATCAATTACGGGGTCA | 331 |
| Pan-CoV | TTAGTTCATAGCCCATATATGGAGTTCCGCGTTACATAACTTACGGTAAA | |
| rAdv5-CAG- | TGGCCCGCCTGGCTGACCGCCCAACGACCCCCGCCCATTGACGTCAAT | |
| Nucleocapsid | AATGACGTATGTTCCCATAGTAACGCCAATAGGGACTTTCCATTGACGT | |
| | CAATGGGTGGAGTATTTACGGTAAACTGCCCACTTGGCAGTACATCAAG | |
| | TGTATCATATGCCAAGTACGCCCCCTATTGACGTCAATGACGGTAAATG | |
| | GCCCGCCTGGCATTATGCCCAGTACATGACCTTATGGGACTTTCCTACT | |
| | TGGCAGTACATCTACGTATTAGTCATCGCTATTACCATGGTCGAGGTGA | |
| | GCCCCACGTTCTGCTTCACTCTCCCCATCTCCCCCCCCTCCCCACCCC | |
| | CAATTTTGTATTTATTTATTTTTTAATTATTTTGTGCAGCGATGGGGGCG | |
| | GGGGGGGGGGGGGGGCGCGCGCCAGGCGGGGCGGGGCGGGGCGA | |
| | GGGGCGGGGCGGGGCGAGGCGGAGAGGTGCGGCGGCAGCCAATCA | |
| | GAGCGGCGCGCTCCGAAAGTTTCCTTTTATGGCGAGGCGGCGGCGGC | |
| | GGCGGCCCTATAAAAAGCGAAGCGCGCGGCGGGCGGGAGTCGCTGC | |
| | GCGCTGCCTTCGCCCCGTGCCCCGCTCCGCCGCCGCCTCGCGCCGCC | |
| | CGCCCCGGCTCTGACTGACCGCGTTACTCCCACAGGTGAGCGGGCGG | |
| | GACGGCCCTTCTCCTCCGGGCTGTAATTAGCGCTTGGTTTAATGACGG | |
| | CTTGTTTCTTTTCTGTGGCTGCGTGAAAGCCTTGAGGGGCTCCGGGAG | |
| | GGCCCTTTGTGCGGGGGGAGCGGCTCGGGGGGTGCGTGCGTGTGTG | |
| | TGTGCGTGGGGAGCGCCGCGTGCGGCTCCGCGCTGCCCGGCGGCTG | |
| | TGAGCGCTGCGGGCGCGGCGCGGGGCTTTGTGCGCTCCGCAGTGTGC | |
| | GCGAGGGGAGCGCGGCCGGGGGCGGTGCCCCGCGGTGCGGGGGGG | |
| | GCTGCGAGGGGAACAAAGGCTGCGTGCGGGGTGTGTGCGTGGGGGG | |
| | GTGAGCAGGGGGTGTGGGCGCGTCGGTCGGGCTGCAACCCCCCCTG | |
| | CACCCCCCTCCCCGAGTTGCTGAGCACGGCCCGGCTTCGGGTGCGGG | |
| | GCTCCGTACGGGGCGTGGCGCGGGGCTCGCCGTGCCGGGCGGGGGG | |
| | TGGCGGCAGGTGGGGGTGCCGGGCGGGGCGGGGCCGCCTCGGGCC | |
| | GGGGAGGGCTCGGGGGAGGGGCGCGGCGGCCCCCGGAGCGCCGGC | |
| | GGCTGTCGAGGCGCGGCGAGCCGCAGCCATTGCCTTTTATGGTAATCG | |
| | TGCGAGAGGGCGCAGGGACTTCCTTTGTCCCAAATCTGTGCGGAGCCG | |
| | AAATCTGGGAGGCGCCGCCGCACCCCCTCTAGCGGGCGCGGGGCGAA | |
| | GCGGTGCGGCGCCGGCAGGAAGGAAATGGGCGGGGAGGGCCTTCGT | |
| | GCGTCGCCGCGCCGCCGTCCCCTTCTCCCTCTCCAGCCTCGGGGCTG | |
| | TCCGCGGGGGGACGGCTGCCTTCGGGGGGGACGGGGCAGGGCGGG | |
| | GTTCGGCTTCTGGCGTGTGACCGGCGGCTCTAGAGCCTCTGCTAACCA | |
| | TGTTCATGCCTTCTTCTTTTTCCTACAGCTCCTGGGCAACGTGCTGGTT | |
| | ATTGTGCTGTCTCATCATTTTGGCAAAGAATTGGAGAATAAACTAGTATT | |
| | CTTCTGGTCCCCACAGACTCAGAGAGAACCCGCCACCATGAGCGACAA | |
| | CGGCCCCCAGAACCAGAGGAACGCCCCCAGGATCACCTTCGGCGGCC | |
| | CCAGCGACAGCACCGGCAGCAACCAGAACGGCGAGAGGAGCGGCGC | |
| | CAGGAGCAAGCAGAGGAGGCCCCAGGGCCTGCCCAACAACACCGCCA | |
| | GCTGGTTCACCGCCCTGACCCAGCACGGCAAGGAGGACCTGAAGTTC | |
| | CCCAGGGGCCAGGGCGTGCCCATCAACACCAACAGCAGCCCCGACGA | |
| | CCAGATCGGCTACTACAGGAGGGCCACCAGGAGGATCAGGGGCGGCG | |
| | ACGGCAAGATGAAGGACCTGAGCCCCAGGTGGTACTTCTACTACCTGG | |
| | GCACCGGCCCCGAGGCCGGCCTGCCCTACGGCGCCAACAAGGACGG | |
| | CATCATCTGGGTGGCCACCGAGGGCGCCCTGAACACCCCCAAGGACC | |
| | ACATCGGCACCAGGAACCCCGCCAACAACGCCGCCATCGTGCTGCAG | |
| | CTGCCCCAGGGCACCACCCTGCCCAAGGGCTTCTACGCCGAGGGCAG | |
| | CAGGGGCGGCAGCCAGGCCAGCAGCAGGAGCAGCAGCAGGAGCAGG | |
| | AACAGCAGCAGGAACAGCACCCCCGGCAGCAGCAGGGGCACCAGCCC | |
| | CGCCAGGATGGCCGGCAACGGCGGCGACGCCGCCCTGGCCCTGCTG | |
| | CTGCTGGACAGGCTGAACCAGCTGGAGAGCAAGATGAGCGGCAAGGG | |
| | CCAGCAGCAGCAGGGCCAGACCGTGACCAAGAAGAGCGCCGCCGAGG | |
| | CCAGCAAGAAGCCCAGGCAGAAGAGGACCGCCACCAAGGCCTACAAC | |
| | GTGACCCAGGCCTTCGGCAGGAGGGGCCCCGAGCAGACCCAGGGCAA | |
| | CTTCGGCGACCAGGAGCTGATCAGGCAGGGCACCGACTACAAGCACT | |
| | GGCCCCAGATCGCCCAGTTCGCCCCCAGCGCCAGCGCCTTCTTCGGC | |
| | ATGAGCAGGATCGGCATGGAGGTGACCCCCAGCGGCACCTGGCTGAC | |
| | CTACACCGGCGCCATCAAGCTGGACGACAAGGACCCCAACTTCAAGGA | |
| | CCAGGTGATCCTGCTGAACAAGCACATCGACGCCTACAAGACCTTCCC | |
| | CCCCACCGAGCCCAAGAAGGACAAGAAGAAGAAGGCCGACGAGACCC | |
| | AGGCCCTGCCCCAGAGGCAGAAGAAGCAGCAGACCGTGACCCTGCTG | |
| | CCCGCCGCCGACCTGGACGACTTCAGCAAGCAGCTGCAGCAGAGCAT | |
| | GAGCAGCGCCGACAGCACCCAGGCCTGATGACTCGAGCTGGTACTGC | |
| | ATGCACGCAATGCTAGCTGCCCCTTTCCCGTCCTGGGTACCCCGAGTC | |
| | TCCCCCGACCTCGGGTCCCAGGTATGCTCCCACCTCCACCTGCCCCAC | |
| | TCACCACCTCTGCTAGTTCCAGACACCTCCCAAGCACGCAGCAATGCA | |
| | GCTCAAAACGCTTAGCCTAGCCACACCCCCACGGGAAACAGCAGTGAT | |
| | TAACCTTTAGCAATAAACGAAAGTTTAACTAAGCTATACTAACCCCAGGG | |
| | TTGGTCAATTTCGTGCCAGCCACACCCTGGAGCTAGCAAAAAAAA | |
| 47 | CTCGACATTGATTATTGACTAGTTATTAATAGTAATCAATTACGGGGTCA | 332 |
| Pan-CoV | TTAGTTCATAGCCCATATATGGAGTTCCGCGTTACATAACTTACGGTAAA | |
| rAdv5-CAG- | TGGCCCGCCTGGCTGACCGCCCAACGACCCCCGCCCATTGACGTCAAT | |
| ORF1a/b | AATGACGTATGTTCCCATAGTAACGCCAATAGGGACTTTCCATTGACGT | |
| | CAATGGGTGGAGTATTTACGGTAAACTGCCCACTTGGCAGTACATCAAG | |
| | TGTATCATATGCCAAGTACGCCCCCTATTGACGTCAATGACGGTAAATG | |
| | GCCCGCCTGGCATTATGCCCAGTACATGACCTTATGGGACTTTCCTACT | |
| | TGGCAGTACATCTACGTATTAGTCATCGCTATTACCATGGTCGAGGTGA | |
| | GCCCCACGTTCTGCTTCACTCTCCCCATCTCCCCCCCCTCCCCACCCC | |
| | CAATTTTGTATTTATTTATTTTTTAATTATTTTGTGCAGCGATGGGGGCG | |
| | GGGGGGGGGGGGGGGCGCGCGCCAGGCGGGGCGGGGCGGGGCGA | |
| | GGGGCGGGGCGGGGCGAGGCGGAGAGGTGCGGCGGCAGCCAATCA | |
| | GAGCGGCGCGCTCCGAAAGTTTCCTTTTATGGCGAGGCGGCGGCGGC | |
| | GGCGGCCCTATAAAAAGCGAAGCGCGCGGCGGGCGGGAGTCGCTGC | |
| | GCGCTGCCTTCGCCCCGTGCCCCGCTCCGCCGCCGCCTCGCGCCGCC | |
| | CGCCCCGGCTCTGACTGACCGCGTTACTCCCACAGGTGAGCGGGCGG | |
| | GACGGCCCTTCTCCTCCGGGCTGTAATTAGCGCTTGGTTTAATGACGG | |
| | CTTGTTTCTTTTCTGTGGCTGCGTGAAAGCCTTGAGGGGCTCCGGGAG | |
| | GGCCCTTTGTGCGGGGGGAGCGGCTCGGGGGGTGCGTGCGTGTGTG | |
| | TGTGCGTGGGGAGCGCCGCGTGCGGCTCCGCGCTGCCCGGCGGCTG | |
| | TGAGCGCTGCGGGCGCGGCGCGGGGCTTTGTGCGCTCCGCAGTGTGC | |
| | GCGAGGGGAGCGCGGCCGGGGGCGGTGCCCCGCGGTGCGGGGGGG | |
| | GCTGCGAGGGGAACAAAGGCTGCGTGCGGGGTGTGTGCGTGGGGGG | |
| | GTGAGCAGGGGGTGTGGGCGCGTCGGTCGGGCTGCAACCCCCCCTG | |
| | CACCCCCCTCCCCGAGTTGCTGAGCACGGCCCGGCTTCGGGTGCGGG | |
| | GCTCCGTACGGGGCGTGGCGCGGGGCTCGCCGTGCCGGGCGGGGGG | |
| | TGGCGGCAGGTGGGGGTGCCGGGCGGGGCGGGGCCGCCTCGGGCC | |
| | GGGGAGGGCTCGGGGGAGGGGCGCGGCGGCCCCCGGAGCGCCGGC | |
| | GGCTGTCGAGGCGCGGCGAGCCGCAGCCATTGCCTTTTATGGTAATCG | |
| | TGCGAGAGGGCGCAGGGACTTCCTTTGTCCCAAATCTGTGCGGAGCCG | |
| | AAATCTGGGAGGCGCCGCCGCACCCCCTCTAGCGGGCGCGGGGCGAA | |
| | GCGGTGCGGCGCCGGCAGGAAGGAAATGGGCGGGGAGGGCCTTCGT | |
| | GCGTCGCCGCGCCGCCGTCCCCTTCTCCCTCTCCAGCCTCGGGGCTG | |
| | TCCGCGGGGGGACGGCTGCCTTCGGGGGGGACGGGGCAGGGCGGG | |
| | GTTCGGCTTCTGGCGTGTGACCGGCGGCTCTAGAGCCTCTGCTAACCA | |
| | TGTTCATGCCTTCTTCTTTTTCCTACAGCTCCTGGGCAACGTGCTGGTT | |
| | ATTGTGCTGTCTCATCATTTTGGCAAAGAATTGGAGAATAAACTAGTATT | |
| | CTTCTGGTCCCCACAGACTCAGAGAGAACCCGCCACCATGGACCAGGA | |
| | ACCCCGCCTGGAGGAAGGCCGTGTTCATCAGCCCCTACAACAGCCAGA | |
| | ACGCCGTGGCCAGCAAGATCCTGGGCCTGCCCACCCAGACCGTGGAC | |
| | AGCAGCCAGGGCAGCGAGTACGACTACGTGATCTTCACCCAGACCACC | |
| | GAGACCGCCCACAGCTGCAACGTGAACAGGTTCAACGTGGCCATCACC | |
| | AGGGCCAAGGTGGGCATCCTGTGCATCATGAGCGACAGGGACCTGTA | |
| | CGACAAGCTGCAGTTCACCAGCCTGGAGATCCCCAGGAGGAACGTGG | |
| | CCACCCTGCAGGCCGAGAACGTGACCGGCCTGTTCAAGGACTGCAGC | |
| | AAGGTGATCACCGGCCTGCACCCCACCCAGGCCCCCACCCACCTGAG | |
| | CGTGGACACCAAGTTCAAGACCGAGGGCCTGTGCGTGGACATCCCCG | |
| | GCATCCCCAAGGACATGACCTACAGGAGGCTGATCAGCATGATGGGCT | |
| | TCAAGATGAACTACCAGGTGAACGGCTACCCCAACATGTTCATCACCAG | |
| | GGAGGAGGCCATCAGGCACGTGAGGGCCTGGATCGGCTTCGACGTGG | |
| | AGGGCTGCCACGCCACCAGGGAGGCCGTGGGCACCAACCTGCCCCTG | |
| | CAGCTGGGCTTCAGCACCGGCGTGAACCTGGTGGCCGTGCCCACCGG | |
| | CTACGTGGACACCCCCAACAACACCGACTTCAGCAGGGTGAGCGCCAA | |
| | GCCCCCCCCCGGCGACCAGTTCAAGCACCTGATCCCCCTGATGTACAA | |
| | GGGCCTGCCCTGGAACGTGGTGAGGATCAAGATCGTGCAGATGCTGA | |
| | GCGACACCCTGAAGAACCTGAGCGACAGGGTGGTGTTCGTGCTGTGG | |
| | GCCCACGGCTTCGAGCTGACCAGCATGAAGTACTTCGTGAAGATCGGC | |
| | CCCGAGAGGACCTGCTGCCTGTGCGACAGGAGGGCCACCTGCTTCAG | |
| | CACCGCCAGCGACACCTACGCCTGCTGGCACCACAGCATCGGCTTCGA | |
| | CTACGTGTACAACCCCTTCATGATCGACGTGCAGCAGTGGGGCTTCAC | |
| | CGGCAACCTGCAGAGCAACCACGACCTGTACTGCCAGGTGCACGGCA | |
| | ACGCCCACGTGGCCAGCTGCGACGCCATCATGACCAGGTGCCTGGCC | |
| | GTGCACGAGTGCTTCGTGAAGAGGGTGGACTGGACCATCGAGTACCCC | |
| | ATCATCGGCGACGAGCTGAAGATCAACGCCGCCTGCAGGAAGGTGCA | |
| | GCACATGGTGGTGAAGGCCGCCCTGCTGGCCGACAAGTTCCCCGTGC | |
| | TGCACGACATCGGCAACCCCAAGGCCATCAAGTGCGTGCCCCAGGCC | |
| | GACGTGGAGTGGAAGTTCTACGACGCCCAGCCCTGCAGCGACAAGGC | |
| | CTACAAGATCGAGGAGCTGTTCTACAGCTACGCCACCCACAGCGACAA | |
| | GTTCACCGACGGCGTGTGCCTGTTCTGGAACTGCAACGTGGACAGGTA | |
| | CCCCGCCAACAGCATCGTGTGCAGGTTCGACACCAGGGTGCTGAGCAA | |
| | CCTGAACCTGCCCGGCTGCGACGGCGGCAGCCTGTACGTGAACAAGC | |
| | ACGCCTTCCACACCCCCGCCTTCGACAAGAGCGCCTTCGTGAACCTGA | |
| | AGCAGCTGCCCTTCTTCTACTACAGCGACAGCCCCTGCGAGAGCCACG | |
| | GCAAGCAGGTGGTGAGCGACATCGACTACGTGCCCCTGAAGAGCGCC | |
| | ACCTGCATCACCAGGTGCAACCTGGGCGGCGCCGTGTGCAGGCACCA | |
| | CGCCAACGAGTACAGGCTGTACCTGGACGCCTACAACATGATGATCAG | |
| | CGCCGGCTTCAGCCTGTGGGTGTACAAGCAGTTCGACACCTACAACCT | |
| | GTGGAACACCTTCACCAGGCTGCAGAGCCTGGAGAACGTGGCCTTCAA | |
| | CGTGGTGAACAAGGGCCACTTCGACGGCCAGCAGGGCGAGGTGCCCG | |
| | TGAGCATCATCAACAACACCGTGTACACCAAGGTGGACGGCGTGGACG | |
| | TGGAGCTGTTCGAGAACAAGACCACCCTGCCCGTGAACGTGGCCTTCG | |
| | AGCTGTGGGCCAAGAGGAACATCAAGCCCGTGCCCGAGGTGAAGATC | |
| | CTGAACAACCTGGGCGTGGACATCGCCGCCAACACCGTGATCTGGGAC | |
| | TACAAGAGGGACGCCCCCGCCCACATCAGCACCATCGGCGTGTGCAG | |
| | CATGACCGACATCGCCAAGAAGCCCACCGAGACCATCTGCGCCCCCCT | |
| | GACCGTGTTCTTCGACGGCAGGGTGGACGGCCAGGTGGACCTGTTCA | |
| | GGAACGCCAGGAACGGCGTGCTGATCACCGAGGGCAGCGTGAAGGGC | |
| | CTGCAGCCCAGCGTGGGCCCCAAGCAGGCCAGCCTGAACGGCGTGAC | |
| | CCTGATCGGCGAGGCCGTGAAGACCCAGTTCAACTACTACAAGAAGGT | |
| | GGACGGCGTGGTGCAGCAGCTGCCCGAGACCTACTTCACCCAGAGCA | |
| | GGAACCTGCAGGAGTTCAAGCCCAGGAGCCAGATGGAGATCGACTTCC | |
| | TGGAGCTGGCCATGGACGAGTTCATCGAGAGGTACAAGCTGGAGGGC | |
| | TACGCCTTCGAGCACATCGTGTACGGCGACTTCAGCCACAGCCAGCTG | |
| | GGCGGCCTGCACCTGCTGATCGGCCTGGCCAAGAGGTTCAAGGAGAG | |
| | CCCCTTCGAGCTGGAGGACTTCATCCCCATGGACAGCACCGTGAAGAA | |
| | CTACTTCATCACCGACGCCCAGACCGGCAGCAGCAAGTGCGTGTGCAG | |
| | CGTGATCGACCTGCTGCTGGACGACTTCGTGGAGATCATCAAGAGCCA | |
| | GGACCTGAGCGTGGTGAGCAAGGTGGTGAAGGTGACCATCGACTACA | |
| | CCGAGATCAGCTTCATGCTGTGGTGCAAGGACGGCCACGTGGAGACCT | |
| | TCTACCCCAAGCTGCAGAGCAGCCAGGCCTGGCAGCCCGGCGTGGCC | |
| | ATGCCCAACCTGTACAAGATGCAGAGGATGCTGCTGGAGAAGTGCGAC | |
| | CTGCAGAACTACGGCGACAGCGCCACCCTGCCCAAGGGCATCATGATG | |
| | AACGTGGCCAAGTACACCCAGCTGTGCCAGTACCTGAACACCCTGACC | |
| | CTGGCCGTGCCCTACAACATGAGGGTGATCCACTTCGGCGCCGGCAG | |
| | CGACAAGGGCGTGGCCCCCGGCACCGCCGTGCTGAGGCAGTGGCTG | |
| | CCCACCGGCACCCTGCTGGTGGACAGCGACCTGAACGACTTCGTGAG | |
| | CGACGCCGACAGCACCCTGATCGGCGACTGCGCCACCGTGCACACCG | |
| | CCAACAAGTGGGACCTGATCATCAGCGACATGTACGACCCCAAGACCA | |
| | AGAACGTGACCAAGGAGAACGACAGCAAGGAGGGCTTCTTCACCTACA | |
| | TCTGCGGCTTCATCCAGCAGAAGCTGGCCCTGGGCGGCAGCGTGGCC | |
| | ATCAAGATCACCGAGCACAGCTGGAACGCCGACCTGTACAAGCTGATG | |
| | GGCCACTTCGCCTGGTGGACCGCCTTCGTGACCAACGTGAACGCCAG | |
| | CAGCAGCGAGGCCTTCCTGATCGGCTGCAACTACCTGGGCAAGCCCA | |
| | GGGAGCAGATCGACGGCTACGTGATGCACGCCAACTACATCTTCTGGA | |
| | GGAACACCAACCCCATCCAGCTGAGCAGCTACAGCCTGTTCGACATGA | |
| | GCAAGTTCCCCCTGAAGCTTGATGACTCGAGCTGGTACTGCATGCACG | |
| | CAATGCTAGCTGCCCCTTTCCCGTCCTGGGTACCCCGAGTCTCCCCCG | |
| | ACCTCGGGTCCCAGGTATGCTCCCACCTCCACCTGCCCCACTCACCAC | |
| | CTCTGCTAGTTCCAGACACCTCCCAAGCACGCAGCAATGCAGCTCAAA | |
| | ACGCTTAGCCTAGCCACACCCCCACGGGAAACAGCAGTGATTAACCTT | |
| | TAGCAATAAACGAAAGTTTAACTAAGCTATACTAACCCCAGGGTTGGTC | |
| | AATTTCGTGCCAGCCACACCCTGGAGCTAGCAAAAAAAA | |
| 48 | CTCGACATTGATTATTGACTAGTTATTAATAGTAATCAATTACGGGGTCA | 333 |
| Pan-CoV | TTAGTTCATAGCCCATATATGGAGTTCCGCGTTACATAACTTACGGTAAA | |
| rAdv5-CAG- | TGGCCCGCCTGGCTGACCGCCCAACGACCCCCGCCCATTGACGTCAAT | |
| Envelope | AATGACGTATGTTCCCATAGTAACGCCAATAGGGACTTTCCATTGACGT | |
| | CAATGGGTGGAGTATTTACGGTAAACTGCCCACTTGGCAGTACATCAAG | |
| | TGTATCATATGCCAAGTACGCCCCCTATTGACGTCAATGACGGTAAATG | |
| | GCCCGCCTGGCATTATGCCCAGTACATGACCTTATGGGACTTTCCTACT | |
| | TGGCAGTACATCTACGTATTAGTCATCGCTATTACCATGGTCGAGGTGA | |
| | GCCCCACGTTCTGCTTCACTCTCCCCATCTCCCCCCCCTCCCCACCCC | |
| | CAATTTTGTATTTATTTATTTTTTAATTATTTTGTGCAGCGATGGGGGCG | |
| | GGGGGGGGGGGGGGGCGCGCGCCAGGCGGGGCGGGGCGGGGCGA | |
| | GGGGCGGGGCGGGGCGAGGCGGAGAGGTGCGGCGGCAGCCAATCA | |
| | GAGCGGCGCGCTCCGAAAGTTTCCTTTTATGGCGAGGCGGCGGCGGC | |
| | GGCGGCCCTATAAAAAGCGAAGCGCGCGGCGGGCGGGAGTCGCTGC | |
| | GCGCTGCCTTCGCCCCGTGCCCCGCTCCGCCGCCGCCTCGCGCCGCC | |
| | CGCCCCGGCTCTGACTGACCGCGTTACTCCCACAGGTGAGCGGGCGG | |
| | GACGGCCCTTCTCCTCCGGGCTGTAATTAGCGCTTGGTTTAATGACGG | |
| | CTTGTTTCTTTTCTGTGGCTGCGTGAAAGCCTTGAGGGGCTCCGGGAG | |
| | GGCCCTTTGTGCGGGGGGAGCGGCTCGGGGGGTGCGTGCGTGTGTG | |
| | TGTGCGTGGGGAGCGCCGCGTGCGGCTCCGCGCTGCCCGGCGGCTG | |
| | TGAGCGCTGCGGGCGCGGCGCGGGGCTTTGTGCGCTCCGCAGTGTGC | |
| | GCGAGGGGAGCGCGGCCGGGGGCGGTGCCCCGCGGTGCGGGGGGG | |
| | GCTGCGAGGGGAACAAAGGCTGCGTGCGGGGTGTGTGCGTGGGGGG | |
| | GTGAGCAGGGGGTGTGGGCGCGTCGGTCGGGCTGCAACCCCCCCTG | |
| | CACCCCCCTCCCCGAGTTGCTGAGCACGGCCCGGCTTCGGGTGCGGG | |
| | GCTCCGTACGGGGCGTGGCGCGGGGCTCGCCGTGCCGGGCGGGGGG | |
| | TGGCGGCAGGTGGGGGTGCCGGGCGGGGCGGGGCCGCCTCGGGCC | |
| | GGGGAGGGCTCGGGGGAGGGGCGCGGCGGCCCCCGGAGCGCCGGC | |
| | GGCTGTCGAGGCGCGGCGAGCCGCAGCCATTGCCTTTTATGGTAATCG | |
| | TGCGAGAGGGCGCAGGGACTTCCTTTGTCCCAAATCTGTGCGGAGCCG | |
| | AAATCTGGGAGGCGCCGCCGCACCCCCTCTAGCGGGCGCGGGGCGAA | |
| | GCGGTGCGGCGCCGGCAGGAAGGAAATGGGCGGGGAGGGCCTTCGT | |
| | GCGTCGCCGCGCCGCCGTCCCCTTCTCCCTCTCCAGCCTCGGGGCTG | |
| | TCCGCGGGGGGACGGCTGCCTTCGGGGGGGACGGGGCAGGGCGGG | |
| | GTTCGGCTTCTGGCGTGTGACCGGCGGCTCTAGAGCCTCTGCTAACCA | |
| | TGTTCATGCCTTCTTCTTTTTCCTACAGCTCCTGGGCAACGTGCTGGTT | |
| | ATTGTGCTGTCTCATCATTTTGGCAAAGAATTGGAGAATAAACTAGTATT | |
| | CTTCTGGTCCCCACAGACTCAGAGAGAACCCGCCACCATGTACAGCTT | |
| | CGTGAGCGAGGAGACCGGCACCCTGATCGTGAACAGCGTGCTGCTGT | |
| | TCCTGGCCTTCGTGGTGTTCCTGCTGGTGACCCTGGCCATCCTGACCG | |
| | CCCTGAGGCTGTGCGCCTACTGCTGCAACATCGTGAACGTGAGCCTGG | |
| | TGAAGCCCAGCTTCTACGTGTACAGCAGGGTGAAGAACCTGAACAGCA | |
| | GCAGGGTGCCCGACCTGCTGGTGTGATGACTCGAGCTGGTACTGCATG | |
| | CACGCAATGCTAGCTGCCCCTTTCCCGTCCTGGGTACCCCGAGTCTCC | |
| | CCCGACCTCGGGTCCCAGGTATGCTCCCACCTCCACCTGCCCCACTCA | |
| | CCACCTCTGCTAGTTCCAGACACCTCCCAAGCACGCAGCAATGCAGCT | |
| | CAAAACGCTTAGCCTAGCCACACCCCCACGGGAAACAGCAGTGATTAA | |
| | CCTTTAGCAATAAACGAAAGTTTAACTAAGCTATACTAACCCCAGGGTT | |
| | GGTCAATTTCGTGCCAGCCACACCCTGGAGCTAGCAAAAAAAA | |
| 49 | CTCGACATTGATTATTGACTAGTTATTAATAGTAATCAATTACGGGGTCA | 334 |
| Pan-CoV | TTAGTTCATAGCCCATATATGGAGTTCCGCGTTACATAACTTACGGTAAA | |
| rAdv5-CAG- | TGGCCCGCCTGGCTGACCGCCCAACGACCCCCGCCCATTGACGTCAAT | |
| Membrane | AATGACGTATGTTCCCATAGTAACGCCAATAGGGACTTTCCATTGACGT | |
| | CAATGGGTGGAGTATTTACGGTAAACTGCCCACTTGGCAGTACATCAAG | |
| | TGTATCATATGCCAAGTACGCCCCCTATTGACGTCAATGACGGTAAATG | |
| | GCCCGCCTGGCATTATGCCCAGTACATGACCTTATGGGACTTTCCTACT | |
| | TGGCAGTACATCTACGTATTAGTCATCGCTATTACCATGGTCGAGGTGA | |
| | GCCCCACGTTCTGCTTCACTCTCCCCATCTCCCCCCCCTCCCCACCCC | |
| | CAATTTTGTATTTATTTATTTTTTAATTATTTTGTGCAGCGATGGGGGCG | |
| | GGGGGGGGGGGGGGGCGCGCGCCAGGCGGGGCGGGGCGGGGCGA | |
| | GGGGCGGGGCGGGGCGAGGCGGAGAGGTGCGGCGGCAGCCAATCA | |
| | GAGCGGCGCGCTCCGAAAGTTTCCTTTTATGGCGAGGCGGCGGCGGC | |
| | GGCGGCCCTATAAAAAGCGAAGCGCGCGGCGGGCGGGAGTCGCTGC | |
| | GCGCTGCCTTCGCCCCGTGCCCCGCTCCGCCGCCGCCTCGCGCCGCC | |
| | CGCCCCGGCTCTGACTGACCGCGTTACTCCCACAGGTGAGCGGGCGG | |
| | GACGGCCCTTCTCCTCCGGGCTGTAATTAGCGCTTGGTTTAATGACGG | |
| | CTTGTTTCTTTTCTGTGGCTGCGTGAAAGCCTTGAGGGGCTCCGGGAG | |
| | GGCCCTTTGTGCGGGGGGAGCGGCTCGGGGGGTGCGTGCGTGTGTG | |
| | TGTGCGTGGGGAGCGCCGCGTGCGGCTCCGCGCTGCCCGGCGGCTG | |
| | TGAGCGCTGCGGGCGCGGCGCGGGGCTTTGTGCGCTCCGCAGTGTGC | |
| | GCGAGGGGAGCGCGGCCGGGGGCGGTGCCCCGCGGTGCGGGGGGG | |
| | GCTGCGAGGGGAACAAAGGCTGCGTGCGGGGTGTGTGCGTGGGGGG | |
| | GTGAGCAGGGGGTGTGGGCGCGTCGGTCGGGCTGCAACCCCCCCTG | |
| | CACCCCCCTCCCCGAGTTGCTGAGCACGGCCCGGCTTCGGGTGCGGG | |
| | GCTCCGTACGGGGCGTGGCGCGGGGCTCGCCGTGCCGGGCGGGGGG | |
| | TGGCGGCAGGTGGGGGTGCCGGGCGGGGCGGGGCCGCCTCGGGCC | |
| | GGGGAGGGCTCGGGGGAGGGGCGCGGCGGCCCCCGGAGCGCCGGC | |
| | GGCTGTCGAGGCGCGGCGAGCCGCAGCCATTGCCTTTTATGGTAATCG | |
| | TGCGAGAGGGCGCAGGGACTTCCTTTGTCCCAAATCTGTGCGGAGCCG | |
| | AAATCTGGGAGGCGCCGCCGCACCCCCTCTAGCGGGCGCGGGGCGAA | |
| | GCGGTGCGGCGCCGGCAGGAAGGAAATGGGCGGGGAGGGCCTTCGT | |
| | GCGTCGCCGCGCCGCCGTCCCCTTCTCCCTCTCCAGCCTCGGGGCTG | |
| | TCCGCGGGGGGACGGCTGCCTTCGGGGGGGACGGGGCAGGGCGGG | |
| | GTTCGGCTTCTGGCGTGTGACCGGCGGCTCTAGAGCCTCTGCTAACCA | |
| | TGTTCATGCCTTCTTCTTTTTCCTACAGCTCCTGGGCAACGTGCTGGTT | |
| | ATTGTGCTGTCTCATCATTTTGGCAAAGAATTGGAGAATAAACTAGTATT | |
| | CTTCTGGTCCCCACAGACTCAGAGAGAACCCGCCACCATGGCCGACAG | |
| | CAACGGCACCATCACCGTGGAGGAGCTGAAGAAGCTGCTGGAGCAGT | |
| | GGAACCTGGTGATCGGCTTCCTGTTCCTGACCTGGATCTGCCTGCTGC | |
| | AGTTCGCCTACGCCAACAGGAACAGGTTCCTGTACATCATCAAGCTGAT | |
| | CTTCCTGTGGCTGCTGTGGCCCGTGACCCTGGCCTGCTTCGTGCTGGC | |
| | CGCCGTGTACAGGATCAACTGGATCACCGGCGGCATCGCCATCGCCAT | |
| | GGCCTGCCTGGTGGGCCTGATGTGGCTGAGCTACTTCATCGCCAGCTT | |
| | CAGGCTGTTCGCCAGGACCAGGAGCATGTGGAGCTTCAACCCCGAGA | |
| | CCAACATCCTGCTGAACGTGCCCCTGCACGGCACCATCCTGACCAGGC | |
| | CCCTGCTGGAGAGCGAGCTGGTGATCGGCGCCGTGATCCTGAGGGGC | |
| | CACCTGAGGATCGCCGGCCACCACCTGGGCAGGTGCGACATCAAGGA | |
| | CCTGCCCAAGGAGATCACCGTGGCCACCAGCAGGACCCTGAGCTACTA | |
| | CAAGCTGGGCGCCAGCCAGAGGGTGGCCGGCGACAGCGGCTTCGCC | |
| | GCCTACAGCAGGTACAGGATCGGCAACTACAAGCTGAACACCGACCAC | |
| | AGCAGCAGCAGCGACAACATCGCCCTGCTGGTGCAGTGATGACTCGAG | |
| | CTGGTACTGCATGCACGCAATGCTAGCTGCCCCTTTCCCGTCCTGGGT | |
| | ACCCCGAGTCTCCCCCGACCTCGGGTCCCAGGTATGCTCCCACCTCCA | |
| | CCTGCCCCACTCACCACCTCTGCTAGTTCCAGACACCTCCCAAGCACG | |
| | CAGCAATGCAGCTCAAAACGCTTAGCCTAGCCACACCCCCACGGGAAA | |
| | CAGCAGTGATTAACCTTTAGCAATAAACGAAAGTTTAACTAAGCTATACT | |
| | AACCCCAGGGTTGGTCAATTTCGTGCCAGCCACACCCTGGAGCTAGCA | |
| | AAAAAAA | |
| 50 | CTCGACATTGATTATTGACTAGTTATTAATAGTAATCAATTACGGGGTCA | 335 |
| Pan-CoV | TTAGTTCATAGCCCATATATGGAGTTCCGCGTTACATAACTTACGGTAAA | |
| rAdv5-CAG- | TGGCCCGCCTGGCTGACCGCCCAACGACCCCCGCCCATTGACGTCAAT | |
| ORF7a | AATGACGTATGTTCCCATAGTAACGCCAATAGGGACTTTCCATTGACGT | |
| | CAATGGGTGGAGTATTTACGGTAAACTGCCCACTTGGCAGTACATCAAG | |
| | TGTATCATATGCCAAGTACGCCCCCTATTGACGTCAATGACGGTAAATG | |
| | GCCCGCCTGGCATTATGCCCAGTACATGACCTTATGGGACTTTCCTACT | |
| | TGGCAGTACATCTACGTATTAGTCATCGCTATTACCATGGTCGAGGTGA | |
| | GCCCCACGTTCTGCTTCACTCTCCCCATCTCCCCCCCCTCCCCACCCC | |
| | CAATTTTGTATTTATTTATTTTTTAATTATTTTGTGCAGCGATGGGGGCG | |
| | GGGGGGGGGGGGGGGCGCGCGCCAGGCGGGGCGGGGCGGGGCGA | |
| | GGGGCGGGGCGGGGCGAGGCGGAGAGGTGCGGCGGCAGCCAATCA | |
| | GAGCGGCGCGCTCCGAAAGTTTCCTTTTATGGCGAGGCGGCGGCGGC | |
| | GGCGGCCCTATAAAAAGCGAAGCGCGCGGCGGGCGGGAGTCGCTGC | |
| | GCGCTGCCTTCGCCCCGTGCCCCGCTCCGCCGCCGCCTCGCGCCGCC | |
| | CGCCCCGGCTCTGACTGACCGCGTTACTCCCACAGGTGAGCGGGCGG | |
| | GACGGCCCTTCTCCTCCGGGCTGTAATTAGCGCTTGGTTTAATGACGG | |
| | CTTGTTTCTTTTCTGTGGCTGCGTGAAAGCCTTGAGGGGCTCCGGGAG | |
| | GGCCCTTTGTGCGGGGGGAGCGGCTCGGGGGGTGCGTGCGTGTGTG | |
| | TGTGCGTGGGGAGCGCCGCGTGCGGCTCCGCGCTGCCCGGCGGCTG | |
| | TGAGCGCTGCGGGCGCGGCGCGGGGCTTTGTGCGCTCCGCAGTGTGC | |
| | GCGAGGGGAGCGCGGCCGGGGGCGGTGCCCCGCGGTGCGGGGGGG | |
| | GCTGCGAGGGGAACAAAGGCTGCGTGCGGGGTGTGTGCGTGGGGGG | |
| | GTGAGCAGGGGGTGTGGGCGCGTCGGTCGGGCTGCAACCCCCCCTG | |
| | CACCCCCCTCCCCGAGTTGCTGAGCACGGCCCGGCTTCGGGTGCGGG | |
| | GCTCCGTACGGGGCGTGGCGCGGGGCTCGCCGTGCCGGGCGGGGGG | |
| | TGGCGGCAGGTGGGGGTGCCGGGCGGGGCGGGGCCGCCTCGGGCC | |
| | TGGCGGCAGGTGGGGGTGCCGGGCGGGGCGGGGCCGCCTCGGGCC | |
| | GGGGAGGGCTCGGGGGAGGGGCGCGGCGGCCCCCGGAGCGCCGGC | |
| | GGCTGTCGAGGCGCGGCGAGCCGCAGCCATTGCCTTTTATGGTAATCG | |
| | TGCGAGAGGGCGCAGGGACTTCCTTTGTCCCAAATCTGTGCGGAGCCG | |
| | AAATCTGGGAGGCGCCGCCGCACCCCCTCTAGCGGGCGCGGGGCGAA | |
| | GCGGTGCGGCGCCGGCAGGAAGGAAATGGGCGGGGAGGGCCTTCGT | |
| | GCGTCGCCGCGCCGCCGTCCCCTTCTCCCTCTCCAGCCTCGGGGCTG | |
| | TCCGCGGGGGGACGGCTGCCTTCGGGGGGGACGGGGCAGGGCGGG | |
| | GTTCGGCTTCTGGCGTGTGACCGGCGGCTCTAGAGCCTCTGCTAACCA | |
| | TGTTCATGCCTTCTTCTTTTTCCTACAGCTCCTGGGCAACGTGCTGGTT | |
| | ATTGTGCTGTCTCATCATTTTGGCAAAGAATTGGAGAATAAACTAGTATT | |
| | CTTCTGGTCCCCACAGACTCAGAGAGAACCCGCCACCATGAAGATCAT | |
| | CCTGTTCCTGGCCCTGATCACCCTGGCCACCTGCGAGCTGTACCACTA | |
| | CCAGGAGTGCGTGAGGGGCACCACCGTGTGATGACTCGAGCTGGTAC | |
| | TGCATGCACGCAATGCTAGCTGCCCCTTTCCCGTCCTGGGTACCCCGA | |
| | GTCTCCCCCGACCTCGGGTCCCAGGTATGCTCCCACCTCCACCTGCCC | |
| | CACTCACCACCTCTGCTAGTTCCAGACACCTCCCAAGCACGCAGCAAT | |
| | GCAGCTCAAAACGCTTAGCCTAGCCACACCCCCACGGGAAACAGCAGT | |
| | GATTAACCTTTAGCAATAAACGAAAGTTTAACTAAGCTATACTAACCCCA | |
| | GGGTTGGTCAATTTCGTGCCAGCCACACCCTGGAGCTAGCAAAAAAAA | |
| 51 | CTCGACATTGATTATTGACTAGTTATTAATAGTAATCAATTACGGGGTCA | 336 |
| Pan-CoV | TTAGTTCATAGCCCATATATGGAGTTCCGCGTTACATAACTTACGGTAAA | |
| rAdv-CAG- | TGGCCCGCCTGGCTGACCGCCCAACGACCCCCGCCCATTGACGTCAAT | |
| NSP3 | AATGACGTATGTTCCCATAGTAACGCCAATAGGGACTTTCCATTGACGT | |
| | CAATGGGTGGAGTATTTACGGTAAACTGCCCACTTGGCAGTACATCAAG | |
| | TGTATCATATGCCAAGTACGCCCCCTATTGACGTCAATGACGGTAAATG | |
| | GCCCGCCTGGCATTATGCCCAGTACATGACCTTATGGGACTTTCCTACT | |
| | TGGCAGTACATCTACGTATTAGTCATCGCTATTACCATGGTCGAGGTGA | |
| | GCCCCACGTTCTGCTTCACTCTCCCCATCTCCCCCCCCTCCCCACCCC | |
| | CAATTTTGTATTTATTTATTTTTTAATTATTTTGTGCAGCGATGGGGGCG | |
| | GGGGGGGGGGGGGGGCGCGCGCCAGGCGGGGCGGGGCGGGGCGA | |
| | GGGGCGGGGCGGGGCGAGGCGGAGAGGTGCGGCGGCAGCCAATCA | |
| | GAGCGGCGCGCTCCGAAAGTTTCCTTTTATGGCGAGGCGGCGGCGGC | |
| | GGCGGCCCTATAAAAAGCGAAGCGCGCGGCGGGCGGGAGTCGCTGC | |
| | GCGCTGCCTTCGCCCCGTGCCCCGCTCCGCCGCCGCCTCGCGCCGCC | |
| | CGCCCCGGCTCTGACTGACCGCGTTACTCCCACAGGTGAGCGGGCGG | |
| | GACGGCCCTTCTCCTCCGGGCTGTAATTAGCGCTTGGTTTAATGACGG | |
| | CTTGTTTCTTTTCTGTGGCTGCGTGAAAGCCTTGAGGGGCTCCGGGAG | |
| | GGCCCTTTGTGCGGGGGGAGCGGCTCGGGGGGTGCGTGCGTGTGTG | |
| | TGTGCGTGGGGAGCGCCGCGTGCGGCTCCGCGCTGCCCGGCGGCTG | |
| | TGAGCGCTGCGGGCGCGGCGCGGGGCTTTGTGCGCTCCGCAGTGTGC | |
| | GCGAGGGGAGCGCGGCCGGGGGCGGTGCCCCGCGGTGCGGGGGGG | |
| | GCTGCGAGGGGAACAAAGGCTGCGTGCGGGGTGTGTGCGTGGGGGG | |
| | GTGAGCAGGGGGTGTGGGCGCGTCGGTCGGGCTGCAACCCCCCCTG | |
| | CACCCCCCTCCCCGAGTTGCTGAGCACGGCCCGGCTTCGGGTGCGGG | |
| | GCTCCGTACGGGGCGTGGCGCGGGGCTCGCCGTGCCGGGCGGGGGG | |
| | TGGCGGCAGGTGGGGGTGCCGGGCGGGGCGGGGCCGCCTCGGGCC | |
| | GGGGAGGGCTCGGGGGAGGGGCGCGGCGGCCCCCGGAGCGCCGGC | |
| | GGCTGTCGAGGCGCGGCGAGCCGCAGCCATTGCCTTTTATGGTAATCG | |
| | TGCGAGAGGGCGCAGGGACTTCCTTTGTCCCAAATCTGTGCGGAGCCG | |
| | AAATCTGGGAGGCGCCGCCGCACCCCCTCTAGCGGGCGCGGGGCGAA | |
| | GCGGTGCGGCGCCGGCAGGAAGGAAATGGGCGGGGAGGGCCTTCGT | |
| | GCGTCGCCGCGCCGCCGTCCCCTTCTCCCTCTCCAGCCTCGGGGCTG | |
| | TCCGCGGGGGGACGGCTGCCTTCGGGGGGGACGGGGCAGGGCGGG | |
| | GTTCGGCTTCTGGCGTGTGACCGGCGGCTCTAGAGCCTCTGCTAACCA | |
| | TGTTCATGCCTTCTTCTTTTTCCTACAGCTCCTGGGCAACGTGCTGGTT | |
| | ATTGTGCTGTCTCATCATTTTGGCAAAGAATTGGAGAATAAACTAGTATT | |
| | CTTCTGGTCCCCACAGACTCAGAGAGAACCCGCCACCATGGCCCCCAC | |
| | CAAGGTGACCTTCGGCGACGACACCGTGATCGAGGTGCAGGGCTACA | |
| | AGAGCGTGAACATCACCTTCGAGCTGGACGAGAGGATCGACAAGGTGC | |
| | TGAACGAGAAGTGCAGCGCCTACACCGTGGAGCTGGGCACCGAGGTG | |
| | AACGAGTTCGCCTGCGTGGTGGCCGACGCCGTGATCAAGACCCTGCA | |
| | GCCCGTGAGCGAGCTGCTGACCCCCCTGGGCATCGACCTGGACGAGT | |
| | GGAGCATGGCCACCTACTACCTGTTCGACGAGAGCGGCGAGTTCAAGC | |
| | TGGCCAGCCACATGTACTGCAGCTTCTACCCCCCCGACGAGGACGAGG | |
| | AGGAGGGCGACTGCGAGGAGGAGGAGTTCGAGCCCAGCACCCAGTAC | |
| | GAGTACGGCACCGAGGACGACTACCAGGGCAAGCCCCTGGAGTTCGG | |
| | CGCCACCAGCGCCGCCCTGCAGCCCGAGGAGGAGCAGGAGGAGGAC | |
| | TGGCTGGACGACGACAGCCAGCAGACCGTGGGCCAGCAGGACGGCAG | |
| | CGAGGACAACCAGACCACCACCATCCAGACCATCGTGGAGGTGCAGC | |
| | CCCAGCTGGAGATGGAGCTGACCCCCGTGGTGCAGACCATCGAGGTG | |
| | AACAGCTTCAGCGGCTACCTGAAGCTGACCGACAACGTGTACATCAAG | |
| | AACGCCGACATCGTGGAGGAGGCCAAGAAGGTGAAGCCCACCGTGGT | |
| | GGTGAACGCCGCCAACGTGTACCTGAAGCACGGCGGCGGCGTGGCCG | |
| | GCGCCCTGAACAAGGCCACCAACAACGCCATGCAGGTGGAGAGCGAC | |
| | GACTACATCGCCACCAACGGCCCCCTGAAGGTGGGCGGCAGCTGCGT | |
| | GCTGAGCGGCCACAACCTGGCCAAGCACTGCCTGCACGTGGTGGGCC | |
| | CCAACGTGAACAAGGGCGAGGACATCCAGCTGCTGAAGAGCGCCTAC | |
| | GAGAACTTCAACCAGCACGAGGTGCTGCTGGCCCCCCTGCTGAGCGC | |
| | CGGCATCTTCGGCGCCGACCCCATCCACAGCCTGAGGGTGTGCGTGG | |
| | ACACCGTGAGGACCAACGTGTACCTGGCCGTGTTCGACAAGAACCTGT | |
| | ACGACAAGCTGGTGAGCAGCTTCCTGGAGATGAAGAGCGAGAAGCAG | |
| | GTGGAGCAGAAGATCGCCGAGATCCCCAAGGAGGAGGTGAAGCCCTT | |
| | CATCACCGAGAGCAAGCCCAGCGTGGAGCAGAGGAAGCAGGACGACA | |
| | AGAAGATCAAGGCCTGCGTGGAGGAGGTGACCACCACCCTGGAGGAG | |
| | ACCAAGTTCCTGACCGAGAACCTGCTGCTGTACATCGACATCAACGGC | |
| | AACCTGCACCCCGACAGCGCCACCCTGGTGAGCGACATCGACATCACC | |
| | TTCCTGAAGAAGGACGCCCCCTACATCGTGGGCGACGTGGTGCAGGA | |
| | GGGCGTGCTGACCGCCGTGGTGATCCCCACCAAGAAGGCCGGCGGCA | |
| | CCACCGAGATGCTGGCCAAGGCCCTGAGGAAGGTGCCCACCGACAAC | |
| | TACATCACCACCTACCCCGGCCAGGGCCTGAACGGCTACACCGTGGAG | |
| | GAGGCCAAGACCGTGCTGAAGAAGTGCAAGAGCGCCTTCTACATCCTG | |
| | CCCAGCATCATCAGCAACGAGAAGCAGGAGATCCTGGGCACCGTGAG | |
| | CTGGAACCTGAGGGAGATGCTGGCCCACGCCGAGGAGACCAGGAAGC | |
| | TGATGCCCGTGTGCGTGGAGACCAAGGCCATCGTGAGCACCATCCAGA | |
| | GGAAGTACAAGGGCATCAAGATCCAGGAGGGCGTGGTGGACTACGGC | |
| | GCCAGGTTCTACTTCTACACCAGCAAGACCACCGTGGCCAGCCTGATC | |
| | AACACCCTGAACGACCTGAACGAGACCCTGGTGACCATGCCCCTGGGC | |
| | TACGTGACCCACGGCCTGAACCTGGAGGAGGCCGCCAGGTACATGAG | |
| | GAGCCTGAAGGTGCCCGCCACCGTGAGCGTGAGCAGCCCCGACGCCG | |
| | TGACCGCCTACAACGGCTACCTGACCAGCAGCAGCAAGACCCCCGAG | |
| | GAGCACTTCATCGAGACCATCAGCCTGGCCGGCAGCTACAAGGACTGG | |
| | AGCTACAGCGGCCAGAGCACCCAGCTGGGCATCGAGTTCCTGAAGAG | |
| | GGGCGACAAGAGCGTGTACTACACCAGCAACCCCACCACCTTCCACCT | |
| | GGACGGCGAGGTGATCACCTTCGACAACCTGAAGACCCTGCTGAGCCT | |
| | GAGGGAGGTGAGGACCATCAAGGTGTTCACCACCGTGGACAACATCAA | |
| | CCTGCACTGATGACTCGAGCTGGTACTGCATGCACGCAATGCTAGCTG | |
| | CCCCTTTCCCGTCCTGGGTACCCCGAGTCTCCCCCGACCTCGGGTCCC | |
| | AGGTATGCTCCCACCTCCACCTGCCCCACTCACCACCTCTGCTAGTTCC | |
| | AGACACCTCCCAAGCACGCAGCAATGCAGCTCAAAACGCTTAGCCTAG | |
| | CCACACCCCCACGGGAAACAGCAGTGATTAACCTTTAGCAATAAACGAA | |
| | AGTTTAACTAAGCTATACTAACCCCAGGGTTGGTCAATTTCGTGCCAGC | |
| | CACACCCTGGAGCTAGCAAAAAAAA | |
| 52 | CTCGACATTGATTATTGACTAGTTATTAATAGTAATCAATTACGGGGTCA | 337 |
| Pan-CoV | TTAGTTCATAGCCCATATATGGAGTTCCGCGTTACATAACTTACGGTAAA | |
| rAdv5-CAG- | TGGCCCGCCTGGCTGACCGCCCAACGACCCCCGCCCATTGACGTCAAT | |
| NSP5 | AATGACGTATGTTCCCATAGTAACGCCAATAGGGACTTTCCATTGACGT | |
| | CAATGGGTGGAGTATTTACGGTAAACTGCCCACTTGGCAGTACATCAAG | |
| | TGTATCATATGCCAAGTACGCCCCCTATTGACGTCAATGACGGTAAATG | |
| | GCCCGCCTGGCATTATGCCCAGTACATGACCTTATGGGACTTTCCTACT | |
| | TGGCAGTACATCTACGTATTAGTCATCGCTATTACCATGGTCGAGGTGA | |
| | GCCCCACGTTCTGCTTCACTCTCCCCATCTCCCCCCCCTCCCCACCCC | |
| | CAATTTTGTATTTATTTATTTTTTAATTATTTTGTGCAGCGATGGGGGCG | |
| | GGGGGGGGGGGGGGGCGCGCGCCAGGCGGGGCGGGGCGGGGCGA | |
| | GGGGCGGGGCGGGGCGAGGCGGAGAGGTGCGGCGGCAGCCAATCA | |
| | GAGCGGCGCGCTCCGAAAGTTTCCTTTTATGGCGAGGCGGCGGCGGC | |
| | GGCGGCCCTATAAAAAGCGAAGCGCGCGGCGGGCGGGAGTCGCTGC | |
| | GCGCTGCCTTCGCCCCGTGCCCCGCTCCGCCGCCGCCTCGCGCCGCC | |
| | CGCCCCGGCTCTGACTGACCGCGTTACTCCCACAGGTGAGCGGGCGG | |
| | GACGGCCCTTCTCCTCCGGGCTGTAATTAGCGCTTGGTTTAATGACGG | |
| | CTTGTTTCTTTTCTGTGGCTGCGTGAAAGCCTTGAGGGGCTCCGGGAG | |
| | GGCCCTTTGTGCGGGGGGAGCGGCTCGGGGGGTGCGTGCGTGTGTG | |
| | TGTGCGTGGGGAGCGCCGCGTGCGGCTCCGCGCTGCCCGGCGGCTG | |
| | TGAGCGCTGCGGGCGCGGCGCGGGGCTTTGTGCGCTCCGCAGTGTGC | |
| | GCGAGGGGAGCGCGGCCGGGGGCGGTGCCCCGCGGTGCGGGGGGG | |
| | GCTGCGAGGGGAACAAAGGCTGCGTGCGGGGTGTGTGCGTGGGGGG | |
| | GTGAGCAGGGGGTGTGGGCGCGTCGGTCGGGCTGCAACCCCCCCTG | |
| | CACCCCCCTCCCCGAGTTGCTGAGCACGGCCCGGCTTCGGGTGCGGG | |
| | GCTCCGTACGGGGCGTGGCGCGGGGCTCGCCGTGCCGGGCGGGGGG | |
| | TGGCGGCAGGTGGGGGTGCCGGGCGGGGCGGGGCCGCCTCGGGCC | |
| | GGGGAGGGCTCGGGGGAGGGGCGCGGCGGCCCCCGGAGCGCCGGC | |
| | GGCTGTCGAGGCGCGGCGAGCCGCAGCCATTGCCTTTTATGGTAATCG | |
| | TGCGAGAGGGCGCAGGGACTTCCTTTGTCCCAAATCTGTGCGGAGCCG | |
| | AAATCTGGGAGGCGCCGCCGCACCCCCTCTAGCGGGCGCGGGGCGAA | |
| | GCGGTGCGGCGCCGGCAGGAAGGAAATGGGCGGGGAGGGCCTTCGT | |
| | GCGTCGCCGCGCCGCCGTCCCCTTCTCCCTCTCCAGCCTCGGGGCTG | |
| | TCCGCGGGGGGACGGCTGCCTTCGGGGGGGACGGGGCAGGGCGGG | |
| | GTTCGGCTTCTGGCGTGTGACCGGCGGCTCTAGAGCCTCTGCTAACCA | |
| | TGTTCATGCCTTCTTCTTTTTCCTACAGCTCCTGGGCAACGTGCTGGTT | |
| | ATTGTGCTGTCTCATCATTTTGGCAAAGAATTGGAGAATAAACTAGTATT | |
| | CTTCTGGTCCCCACAGACTCAGAGAGAACCCGCCACCATGAGCGGCTT | |
| | CAGGAAGATGGCCTTCCCCAGCGGCAAGGTGGAGGGCTGCATGGTGC | |
| | AGGTGACCTGCGGCACCACCACCCTGAACGGCCTGTGGCTGGACGAC | |
| | GTGGTGTACTGCCCCAGGCACGTGATCTGCACCAGCGAGGACATGCTG | |
| | AACCCCAACTACGAGGACCTGCTGATCAGGAAGAGCAACCACAACTTC | |
| | CTGGTGCAGGCCGGCAACGTGCAGCTGAGGGTGATCGGCCACAGCAT | |
| | GCAGAACTGCGTGCTGAAGCTGAAGGTGGACACCGCCAACCCCAAGA | |
| | CCCCCAAGTACAAGTTCGTGAGGATCCAGCCCGGCCAGACCTTCAGCG | |
| | TGCTGGCCTGCTACAACGGCAGCCCCAGCGGCGTGTACCAGTGCGCC | |
| | ATGAGGCCCAACTTCACCATCAAGGGCAGCTTCCTGAACGGCAGCTGC | |
| | GGCAGCGTGGGCTTCAACATCGACTACGACTGCGTGAGCTTCTGCTAC | |
| | ATGCACCACATGGAGCTGCCCACCGGCGTGCACGCCGGCACCGACCT | |
| | GGAGGGCAACTTCTACGGCCCCTTCGTGGACAGGCAGACCGCCCAGG | |
| | CCGCCGGCACCGACACCACCATCACCGTGAACGTGCTGGCCTGGCTG | |
| | TACGCCGCCGTGATCAACGGCGACAGGTGGTTCCTGAACAGGTTCACC | |
| | ACCACCCTGAACGACTTCAACCTGGTGGCCATGAAGTACAACTACGAG | |
| | CCCCTGACCCAGGACCACGTGGACATCCTGGGCCCCCTGAGCGCCCA | |
| | GACCGGCATCGCCGTGCTGGACATGTGCGCCAGCCTGAAGGAGCTGC | |
| | TGCAGAACGGCATGAACGGCAGGACCATCCTGGGCAGCGCCCTGCTG | |
| | GAGGACGAGTTCACCCCCTTCGACGTGGTGAGGCAGTGCAGCGGCGT | |
| | GACCTTCCAGTGATGACTCGAGCTGGTACTGCATGCACGCAATGCTAG | |
| | CTGCCCCTTTCCCGTCCTGGGTACCCCGAGTCTCCCCCGACCTCGGGT | |
| | CCCAGGTATGCTCCCACCTCCACCTGCCCCACTCACCACCTCTGCTAG | |
| | TTCCAGACACCTCCCAAGCACGCAGCAATGCAGCTCAAAACGCTTAGC | |
| | CTAGCCACACCCCCACGGGAAACAGCAGTGATTAACCTTTAGCAATAAA | |
| | CGAAAGTTTAACTAAGCTATACTAACCCCAGGGTTGGTCAATTTCGTGC | |
| | CAGCCACACCCTGGAGCTAGCAAAAAAAA | |
| 53 | CTCGACATTGATTATTGACTAGTTATTAATAGTAATCAATTACGGGGTCA | 338 |
| Pan-CoV | TTAGTTCATAGCCCATATATGGAGTTCCGCGTTACATAACTTACGGTAAA | |
| rAdv5-CAG- | TGGCCCGCCTGGCTGACCGCCCAACGACCCCCGCCCATTGACGTCAAT | |
| NSP12 | AATGACGTATGTTCCCATAGTAACGCCAATAGGGACTTTCCATTGACGT | |
| | CAATGGGTGGAGTATTTACGGTAAACTGCCCACTTGGCAGTACATCAAG | |
| | TGTATCATATGCCAAGTACGCCCCCTATTGACGTCAATGACGGTAAATG | |
| | GCCCGCCTGGCATTATGCCCAGTACATGACCTTATGGGACTTTCCTACT | |
| | TGGCAGTACATCTACGTATTAGTCATCGCTATTACCATGGTCGAGGTGA | |
| | GCCCCACGTTCTGCTTCACTCTCCCCATCTCCCCCCCCTCCCCACCCC | |
| | CAATTTGTATTTTATTTATTTTTTAATTATTTTGTGCAGCGATGGGGGCG | |
| | GGGGGGGGGGGGGGGCGCGCGCCAGGCGGGGCGGGGCGGGGCGA | |
| | GGGGCGGGGCGGGGCGAGGCGGAGAGGTGCGGCGGCAGCCAATCA | |
| | GAGCGGCGCGCTCCGAAAGTTTCCTTTTATGGCGAGGCGGCGGCGGC | |
| | GGCGGCCCTATAAAAAGCGAAGCGCGCGGCGGGCGGGAGTCGCTGC | |
| | GCGCTGCCTTCGCCCCGTGCCCCGCTCCGCCGCCGCCTCGCGCCGCC | |
| | CGCCCCGGCTCTGACTGACCGCGTTACTCCCACAGGTGAGCGGGCGG | |
| | GACGGCCCTTCTCCTCCGGGCTGTAATTAGCGCTTGGTTTAATGACGG | |
| | CTTGTTTCTTTTCTGTGGCTGCGTGAAAGCCTTGAGGGGCTCCGGGAG | |
| | GGCCCTTTGTGCGGGGGGAGCGGCTCGGGGGGTGCGTGCGTGTGTG | |
| | TGTGCGTGGGGAGCGCCGCGTGCGGCTCCGCGCTGCCCGGCGGCTG | |
| | TGAGCGCTGCGGGCGCGGCGCGGGGCTTTGTGCGCTCCGCAGTGTGC | |
| | GCGAGGGGAGCGCGGCCGGGGGCGGTGCCCCGCGGTGCGGGGGGG | |
| | GCTGCGAGGGGAACAAAGGCTGCGTGCGGGGTGTGTGCGTGGGGGG | |
| | GTGAGCAGGGGGTGTGGGCGCGTCGGTCGGGCTGCAACCCCCCCTG | |
| | CACCCCCCTCCCCGAGTTGCTGAGCACGGCCCGGCTTCGGGTGCGGG | |
| | GCTCCGTACGGGGCGTGGCGCGGGGCTCGCCGTGCCGGGCGGGGGG | |
| | TGGCGGCAGGTGGGGGTGCCGGGCGGGGCGGGGCCGCCTCGGGCC | |
| | GGGGAGGGCTCGGGGGAGGGGCGCGGCGGCCCCCGGAGCGCCGGC | |
| | GGCTGTCGAGGCGCGGCGAGCCGCAGCCATTGCCTTTTATGGTAATCG | |
| | TGCGAGAGGGCGCAGGGACTTCCTTTGTCCCAAATCTGTGCGGAGCCG | |
| | AAATCTGGGAGGCGCCGCCGCACCCCCTCTAGCGGGCGCGGGGCGAA | |
| | GCGGTGCGGCGCCGGCAGGAAGGAAATGGGCGGGGAGGGCCTTCGT | |
| | GCGTCGCCGCGCCGCCGTCCCCTTCTCCCTCTCCAGCCTCGGGGCTG | |
| | TCCGCGGGGGGACGGCTGCCTTCGGGGGGGACGGGGCAGGGCGGG | |
| | GTTCGGCTTCTGGCGTGTGACCGGCGGCTCTAGAGCCTCTGCTAACCA | |
| | TGTTCATGCCTTCTTCTTTTTCCTACAGCTCCTGGGCAACGTGCTGGTT | |
| | ATTGTGCTGTCTCATCATTTTGGCAAAGAATTGGAGAATAAACTAGTATT | |
| | CTTCTGGTCCCCACAGACTCAGAGAGAACCCGCCACCATGAGCGCCGA | |
| | CGCCCAGAGCTTCCTGAACAGGGTGTGCGGCGTGAGCGCCGCCAGGC | |
| | TGACCCCCTGCGGCACCGGCACCAGCACCGACGTGGTGTACAGGGCC | |
| | TTCGACATCTACAACGACAAGGTGGCCGGCTTCGCCAAGTTCCTGAAG | |
| | ACCAACTGCTGCAGGTTCCAGGAGAAGGACGAGGACGACAACCTGATC | |
| | GACAGCTACTTCGTGGTGAAGAGGCACACCTTCAGCAACTACCAGCAC | |
| | GAGGAGACCATCTACAACCTGCTGAAGGACTGCCCCGCCGTGGCCAA | |
| | GCACGACTTCTTCAAGTTCAGGATCGACGGCGACATGGTGCCCCACAT | |
| | CAGCAGGCAGAGGCTGACCAAGTACACCATGGCCGACCTGGTGTACG | |
| | CCCTGAGGCACTTCGACGAGGGCAACTGCGACACCCTGAAGGAGATC | |
| | CTGGTGACCTACAACTGCTGCGACGACGACTACTTCAACAAGAAGGAC | |
| | TGGTACGACTTCGTGGAGAACCCCGACATCCTGAGGGTGTACGCCAAC | |
| | CTGGGCGAGAGGGTGAGGCAGGCCCTGCTGAAGACCGTGCAGTTCTG | |
| | CGACGCCATGAGGAACGCCGGCATCGTGGGCGTGCTGACCCTGGACA | |
| | ACCAGGACCTGAACGGCAACTGGTACGACTTCGGCGACTTCATCCAGA | |
| | CCACCCCCGGCAGCGGCGTGCCCGTGGTGGACAGCTACTACAGCCTG | |
| | CTGATGCCCATCCTGACCCTGACCAGGGCCCTGACCGCCGAGAGCCA | |
| | CGTGGACACCGACCTGACCAAGCCCTACATCAAGTGGGACCTGCTGAA | |
| | GTACGACTTCACCGAGGAGAGGCTGAAGCTGTTCGACAGGTACTTCAA | |
| | GTACTGGGACCAGACCTACCACCCCAACTGCGTGAACTGCCTGGACGA | |
| | CAGGTGCATCCTGCACTGCGCCAACTTCAACGTGCTGTTCAGCACCGT | |
| | GTTCCCCCCCACCAGCTTCGGCCCCCTGGTGAGGAAGATCTTCGTGGA | |
| | CGGCGTGCCCTTCGTGGTGAGCACCGGCTACCACTTCAGGGAGCTGG | |
| | GCGTGGTGCACAACCAGGACGTGAACCTGCACAGCAGCAGGCTGAGC | |
| | TTCAAGGAGCTGCTGGTGTACGCCGCCGACCCCGCCATGCACGCCGC | |
| | CAGCGGCAACCTGCTGCTGGACAAGAGGACCACCTGCTTCAGCGTGG | |
| | CCGCCCTGACCAACAACGTGGCCTTCCAGACCGTGAAGCCCGGCAACT | |
| | TCAACAAGGACTTCTACGACTTCGCCGTGAGCAAGGGCTTCTTCAAGG | |
| | AGGGCAGCAGCGTGGAGCTGAAGCACTTCTTCTTCGCCCAGGACGGC | |
| | AACGCCGCCATCAGCGACTACGACTACTACAGGTACAACCTGCCCACC | |
| | ATGTGCGACATCAGGCAGCTGCTGTTCGTGGTGGAGGTGGTGGACAAG | |
| | TACTTCGACTGCTACGACGGCGGCTGCATCAACGCCAACCAGGTGATC | |
| | GTGAACAACCTGGACAAGAGCGCCGGCTTCCCCTTCAACAAGTGGGGC | |
| | AAGGCCAGGCTGTACTACGACAGCATGAGCTACGAGGACCAGGACGC | |
| | CCTGTTCGCCTACACCAAGAGGAACGTGATCCCCACCATCACCCAGAT | |
| | GAACCTGAAGTACGCCATCAGCGCCAAGAACAGGGCCAGGACCGTGG | |
| | CCGGCGTGAGCATCTGCAGCACCATGACCAACAGGCAGTTCCACCAGA | |
| | AGCTGCTGAAGAGCATCGCCGCCACCAGGGGCGCCACCGTGGTGATC | |
| | GGCACCAGCAAGTTCTACGGCGGCTGGCACAACATGCTGAAGACCGTG | |
| | TACAGCGACGTGGAGAACCCCCACCTGATGGGCTGGGACTACCCCAA | |
| | GTGCGACAGGGCCATGCCCAACATGCTGAGGATCATGGCCAGCCTGG | |
| | TGCTGGCCAGGAAGCACACCACCTGCTGCAGCCTGAGCCACAGGTTCT | |
| | ACAGGCTGGCCAACGAGTGCGCCCAGGTGCTGAGCGAGATGGTGATG | |
| | TGCGGCGGCAGCCTGTACGTGAAGCCCGGCGGCACCAGCAGCGGCG | |
| | ACGCCACCACCGCCTACGCCAACAGCGTGTTCAACATCTGCCAGGCCG | |
| | TGACCGCCAACGTGAACGCCCTGCTGAGCACCGACGGCAACAAGATC | |
| | GCCGACAAGTACGTGAGGAACCTGCAGCACAGGCTGTACGAGTGCCT | |
| | GTACAGGAACAGGGACGTGGACACCGACTTCGTGAACGAGTTCTACGC | |
| | CTACCTGAGGAAGCACTTCAGCATGATGATCCTGAGCGACGACGCCGT | |
| | GGTGTGCTTCAACAGCACCTACGCCAGCCAGGGCCTGGTGGCCAGCA | |
| | TCAAGAACTTCAAGAGCGTGCTGTACTACCAGAACAACGTGTTCATGAG | |
| | CGAGGCCAAGTGCTGGACCGAGACCGACCTGACCAAGGGCCCCCACG | |
| | AGTTCTGCAGCCAGCACACCATGCTGGTGAAGCAGGGCGACGACTACG | |
| | TGTACCTGCCCTACCCCGACCCCAGCAGGATCCTGGGCGCCGGCTGC | |
| | TTCGTGGACGACATCGTGAAGACCGACGGCACCCTGATGATCGAGAGG | |
| | TTCGTGAGCCTGGCCATCGACGCCTACCCCCTGACCAAGCACCCCAAC | |
| | CAGGAGTACGCCGACGTGTTCCACCTGTACCTGCAGTACATCAGGAAG | |
| | CTGCACGACGAGCTGACCGGCCACATGCTGGACATGTACAGCGTGATG | |
| | CTGACCAACGACAACACCAGCAGGTACTGGGAGCCCGAGTTCTACGAG | |
| | GCCATGTACACCCCCCACACCGTGCTGCAGTGATGACTCGAGCTGGTA | |
| | CTGCATGCACGCAATGCTAGCTGCCCCTTTCCCGTCCTGGGTACCCCG | |
| | AGTCTCCCCCGACCTCGGGTCCCAGGTATGCTCCCACCTCCACCTGCC | |
| | CCACTCACCACCTCTGCTAGTTCCAGACACCTCCCAAGCACGCAGCAA | |
| | TGCAGCTCAAAACGCTTAGCCTAGCCACACCCCCACGGGAAACAGCAG | |
| | TGATTAACCTTTAGCAATAAACGAAAGTTTAACTAAGCTATACTAACCCC | |
| | AGGGTTGGTCAATTTCGTGCCAGCCACACCCTGGAGCTAGCAAAAAAA | |
| | A | |
| 54 | ATGTTCGTGTTCCTGGTGCTGCTGCCCCTGGTGAGCAGCCAGTGCGTG | 339 |
| Pan-CoV (B1) | AACCTGACCACCAGGACCCAGCTGCCCCCCGCCTACACCAACAGCTTC | |
| | ACCAGGGGCGTGTACTACCCCGACAAGGTGTTCAGGAGCAGCGTGCT | |
| | GCACAGCACCCAGGACCTGTTCCTGCCCTTCTTCAGCAACGTGACCTG | |
| | GTTCCACGCCATCCACGTGAGCGGCACCAACGGCACCAAGAGGTTCGA | |
| | CAACCCCGTGCTGCCCTTCAACGACGGCGTGTACTTCGCCAGCACCGA | |
| | GAAGAGCAACATCATCAGGGGCTGGATCTTCGGCACCACCCTGGACAG | |
| | CAAGACCCAGAGCCTGCTGATCGTGAACAACGCCACCAACGTGGTGAT | |
| | CAAGGTGTGCGAGTTCCAGTTCTGCAACGACCCCTTCCTGGGCGTGTA | |
| | CTACCACAAGAACAACAAGAGCTGGATGGAGAGCGAGTTCAGGGTGTA | |
| | CAGCAGCGCCAACAACTGCACCTTCGAGTACGTGAGCCAGCCCTTCCT | |
| | GATGGACCTGGAGGGCAAGCAGGGCAACTTCAAGAACCTGAGGGAGT | |
| | TCGTGTTCAAGAACATCGACGGCTACTTCAAGATCTACAGCAAGCACAC | |
| | CCCCATCAACCTGGTGAGGGACCTGCCCCAGGGCTTCAGCGCCCTGG | |
| | AGCCCCTGGTGGACCTGCCCATCGGCATCAACATCACCAGGTTCCAGA | |
| | CCCTGCTGGCCCTGCACAGGAGCTACCTGACCCCCGGCGACAGCAGC | |
| | AGCGGCTGGACCGCCGGCGCCGCCGCCTACTACGTGGGCTACCTGCA | |
| | GCCCAGGACCTTCCTGCTGAAGTACAACGAGAACGGCACCATCACCGA | |
| | CGCCGTGGACTGCGCCCTGGACCCCCTGAGCGAGACCAAGTGCACCC | |
| | TGAAGAGCTTCACCGTGGAGAAGGGCATCTACCAGACCAGCAACTTCA | |
| | GGGTGCAGCCCACCGAGAGCATCGTGAGGTTCCCCAACATCACCAACC | |
| | TGTGCCCCTTCGGCGAGGTGTTCAACGCCACCAGGTTCGCCAGCGTGT | |
| | ACGCCTGGAACAGGAAGAGGATCAGCAACTGCGTGGCCGACTACAGC | |
| | GTGCTGTACAACAGCGCCAGCTTCAGCACCTTCAAGTGCTACGGCGTG | |
| | AGCCCCACCAAGCTGAACGACCTGTGCTTCACCAACGTGTACGCCGAC | |
| | AGCTTCGTGATCAGGGGCGACGAGGTGAGGCAGATCGCCCCCGGCCA | |
| | GACCGGCAAGATCGCCGACTACAACTACAAGCTGCCCGACGACTTCAC | |
| | CGGCTGCGTGATCGCCTGGAACAGCAACAACCTGGACAGCAAGGTGG | |
| | GCGGCAACTACAACTACCTGTACAGGCTGTTCAGGAAGAGCAACCTGA | |
| | AGCCCTTCGAGAGGGACATCAGCACCGAGATCTACCAGGCCGGCAGC | |
| | ACCCCCTGCAACGGCGTGGAGGGCTTCAACTGCTACTTCCCCCTGCAG | |
| | AGCTACGGCTTCCAGCCCACCAACGGCGTGGGCTACCAGCCCTACAG | |
| | GGTGGTGGTGCTGAGCTTCGAGCTGCTGCACGCCCCCGCCACCGTGT | |
| | GCGGCCCCAAGAAGAGCACCAACCTGGTGAAGAACAAGTGCGTGAACT | |
| | TCAACTTCAACGGCCTGACCGGCACCGGCGTGCTGACCGAGAGCAACA | |
| | AGAAGTTCCTGCCCTTCCAGCAGTTCGGCAGGGACATCGCCGACACCA | |
| | CCGACGCCGTGAGGGACCCCCAGACCCTGGAGATCCTGGACATCACC | |
| | CCCTGCAGCTTCGGCGGCGTGAGCGTGATCACCCCCGGCACCAACAC | |
| | CAGCAACCAGGTGGCCGTGCTGTACCAGGACGTGAACTGCACCGAGG | |
| | TGCCCGTGGCCATCCACGCCGACCAGCTGACCCCCACCTGGAGGGTG | |
| | TACAGCACCGGCAGCAACGTGTTCCAGACCAGGGCCGGCTGCCTGAT | |
| | CGGCGCCGAGCACGTGAACAACAGCTACGAGTGCGACATCCCCATCG | |
| | GCGCCGGCATCTGCGCCAGCTACCAGACCCAGACCAACAGCCCCGGC | |
| | AGCGCCAGCAGCGTGGCCAGCCAGAGCATCATCGCCTACACCATGAG | |
| | CCTGGGCGCCGAGAACAGCGTGGCCTACAGCAACAACAGCATCGCCA | |
| | TCCCCACCAACTTCACCATCAGCGTGACCACCGAGATCCTGCCCGTGA | |
| | GCATGACCAAGACCAGCGTGGACTGCACCATGTACATCTGCGGCGACA | |
| | GCACCGAGTGCAGCAACCTGCTGCTGCAGTACGGCAGCTTCTGCACCC | |
| | AGCTGAACAGGGCCCTGACCGGCATCGCCGTGGAGCAGGACAAGAAC | |
| | ACCCAGGAGGTGTTCGCCCAGGTGAAGCAGATCTACAAGACCCCCCCC | |
| | ATCAAGGACTTCGGCGGCTTCAACTTCAGCCAGATCCTGCCCGACCCC | |
| | AGCAAGCCCAGCAAGAGGAGCCCCATCGAGGACCTGCTGTTCAACAAG | |
| | GTGACCCTGGCCGACGCCGGCTTCATCAAGCAGTACGGCGACTGCCT | |
| | GGGCGACATCGCCGCCAGGGACCTGATCTGCGCCCAGAAGTTCAACG | |
| | GCCTGACCGTGCTGCCCCCCCTGCTGACCGACGAGATGATCGCCCAG | |
| | TACACCAGCGCCCTGCTGGCCGGCACCATCACCAGCGGCTGGACCTT | |
| | CGGCGCCGGCCCCGCCCTGCAGATCCCCTTCCCCATGCAGATGGCCT | |
| | ACAGGTTCAACGGCATCGGCGTGACCCAGAACGTGCTGTACGAGAACC | |
| | AGAAGCTGATCGCCAACCAGTTCAACAGCGCCATCGGCAAGATCCAGG | |
| | ACAGCCTGAGCAGCACCCCCAGCGCCCTGGGCAAGCTGCAGGACGTG | |
| | GTGAACCAGAACGCCCAGGCCCTGAACACCCTGGTGAAGCAGCTGAG | |
| | CAGCAACTTCGGCGCCATCAGCAGCGTGCTGAACGACATCCTGAGCAG | |
| | GCTGGACCCCCCCGAGGCCGAGGTGCAGATCGACAGGCTGATCACCG | |
| | GCAGGCTGCAGAGCCTGCAGACCTACGTGACCCAGCAGCTGATCAGG | |
| | GCCGCCGAGATCAGGGCCAGCGCCAACCTGGCCGCCACCAAGATGAG | |
| | CGAGTGCGTGCTGGGCCAGAGCAAGAGGGTGGACTTCTGCGGCAAGG | |
| | GCTACCACCTGATGAGCTTCCCCCAGAGCGCCCCCCACGGCGTGGTG | |
| | TTCCTGCACGTGACCTACGTGCCCGCCCAGGAGAAGAACTTCACCACC | |
| | GCCCCCGCCATCTGCCACGACGGCAAGGCCCACTTCCCCAGGGAGGG | |
| | CGTGTTCGTGAGCAACGGCACCCACTGGTTCGTGACCCAGAGGAACTT | |
| | CTACGAGCCCCAGATCATCACCACCGACAACACCTTCGTGAGCGGCAA | |
| | CTGCGACGTGGTGATCGGCATCGTGAACAACACCGTGTACGACCCCCT | |
| | GCAGCCCGAGCTGGACAGCTTCAAGGAGGAGCTGGACAAGTACTTCAA | |
| | GAACCACACCAGCCCCGACGTGGACCTGGGCGACATCAGCGGCATCA | |
| | ACGCCAGCGTGGTGAACATCCAGAAGGAGATCGACAGGCTGAACGAG | |
| | GTGGCCAAGAACCTGAACGAGAGCCTGATCGACCTGCAGGAGCTGGG | |
| | CAAGTACGAGCAGTACATCAAGTGGCCCTGGTACATCTGGCTGGGCTT | |
| | CATCGCCGGCCTGATCGCCATCGTGATGGTGACCATCATGCTGTGCTG | |
| | CATGACCAGCTGCTGCAGCTGCCTGAAGGGCTGCTGCAGCTGCGGCA | |
| | GCTGCTGCAAGTTCGACGAGGACGACAGCGAGCCCGTGCTGAAGGGC | |
| | GTGAAGCTGCACTACACCGGAAGCGGAGCCACGAACTTCTCTCTGTTA | |
| | AAGCAAGCAGGAGATGTTGAAGAAAACCCCGGGCCTATGAGCGACAAC | |
| | GGCCCCCAGAACCAGAGGAACGCCCCCAGGATCACCTTCGGCGGCCC | |
| | CAGCGACAGCACCGGCAGCAACCAGAACGGCGAGAGGAGCGGCGCC | |
| | AGGAGCAAGCAGAGGAGGCCCCAGGGCCTGCCCAACAACACCGCCAG | |
| | CTGGTTCACCGCCCTGACCCAGCACGGCAAGGAGGACCTGAAGTTCCC | |
| | CAGGGGCCAGGGCGTGCCCATCAACACCAACAGCAGCCCCGACGACC | |
| | AGATCGGCTACTACAGGAGGGCCACCAGGAGGATCAGGGGCGGCGAC | |
| | GGCAAGATGAAGGACCTGAGCCCCAGGTGGTACTTCTACTACCTGGGC | |
| | ACCGGCCCCGAGGCCGGCCTGCCCTACGGCGCCAACAAGGACGGCAT | |
| | CATCTGGGTGGCCACCGAGGGCGCCCTGAACACCCCCAAGGACCACA | |
| | TCGGCACCAGGAACCCCGCCAACAACGCCGCCATCGTGCTGCAGCTG | |
| | CCCCAGGGCACCACCCTGCCCAAGGGCTTCTACGCCGAGGGCAGCAG | |
| | GGGCGGCAGCCAGGCCAGCAGCAGGAGCAGCAGCAGGAGCAGGAAC | |
| | AGCAGCAGGAACAGCACCCCCGGCAGCAGCAGGGGCACCAGCCCCG | |
| | CCAGGATGGCCGGCAACGGCGGCGACGCCGCCCTGGCCCTGCTGCT | |
| | GCTGGACAGGCTGAACCAGCTGGAGAGCAAGATGAGCGGCAAGGGCC | |
| | AGCAGCAGCAGGGCCAGACCGTGACCAAGAAGAGCGCCGCCGAGGCC | |
| | AGCAAGAAGCCCAGGCAGAAGAGGACCGCCACCAAGGCCTACAACGT | |
| | GACCCAGGCCTTCGGCAGGAGGGGCCCCGAGCAGACCCAGGGCAACT | |
| | TCGGCGACCAGGAGCTGATCAGGCAGGGCACCGACTACAAGCACTGG | |
| | CCCCAGATCGCCCAGTTCGCCCCCAGCGCCAGCGCCTTCTTCGGCATG | |
| | AGCAGGATCGGCATGGAGGTGACCCCCAGCGGCACCTGGCTGACCTA | |
| | CACCGGCGCCATCAAGCTGGACGACAAGGACCCCAACTTCAAGGACCA | |
| | GGTGATCCTGCTGAACAAGCACATCGACGCCTACAAGACCTTCCCCCC | |
| | CACCGAGCCCAAGAAGGACAAGAAGAAGAAGGCCGACGAGACCCAGG | |
| | CCCTGCCCCAGAGGCAGAAGAAGCAGCAGACCGTGACCCTGCTGCCC | |
| | GCCGCCGACCTGGACGACTTCAGCAAGCAGCTGCAGCAGAGCATGAG | |
| | CAGCGCCGACAGCACCCAGGCCTGATGA | |
| 55 | ATGTTCGTGTTCCTGGTGCTGCTGCCCCTGGTGAGCAGCCAGTGCGTG | 348 |
| Pan-CoV (B2) | AACCTGACCACCAGGACCCAGCTGCCCCCCGCCTACACCAACAGCTTC | |
| | ACCAGGGGCGTGTACTACCCCGACAAGGTGTTCAGGAGCAGCGTGCT | |
| | GCACAGCACCCAGGACCTGTTCCTGCCCTTCTTCAGCAACGTGACCTG | |
| | GTTCCACGCCATCCACGTGAGCGGCACCAACGGCACCAAGAGGTTCGA | |
| | CAACCCCGTGCTGCCCTTCAACGACGGCGTGTACTTCGCCAGCACCGA | |
| | GAAGAGCAACATCATCAGGGGCTGGATCTTCGGCACCACCCTGGACAG | |
| | CAAGACCCAGAGCCTGCTGATCGTGAACAACGCCACCAACGTGGTGAT | |
| | CAAGGTGTGCGAGTTCCAGTTCTGCAACGACCCCTTCCTGGGCGTGTA | |
| | CTACCACAAGAACAACAAGAGCTGGATGGAGAGCGAGTTCAGGGTGTA | |
| | CAGCAGCGCCAACAACTGCACCTTCGAGTACGTGAGCCAGCCCTTCCT | |
| | GATGGACCTGGAGGGCAAGCAGGGCAACTTCAAGAACCTGAGGGAGT | |
| | TCGTGTTCAAGAACATCGACGGCTACTTCAAGATCTACAGCAAGCACAC | |
| | CCCCATCAACCTGGTGAGGGACCTGCCCCAGGGCTTCAGCGCCCTGG | |
| | AGCCCCTGGTGGACCTGCCCATCGGCATCAACATCACCAGGTTCCAGA | |
| | CCCTGCTGGCCCTGCACAGGAGCTACCTGACCCCCGGCGACAGCAGC | |
| | AGCGGCTGGACCGCCGGCGCCGCCGCCTACTACGTGGGCTACCTGCA | |
| | GCCCAGGACCTTCCTGCTGAAGTACAACGAGAACGGCACCATCACCGA | |
| | CGCCGTGGACTGCGCCCTGGACCCCCTGAGCGAGACCAAGTGCACCC | |
| | TGAAGAGCTTCACCGTGGAGAAGGGCATCTACCAGACCAGCAACTTCA | |
| | GGGTGCAGCCCACCGAGAGCATCGTGAGGTTCCCCAACATCACCAACC | |
| | TGTGCCCCTTCGGCGAGGTGTTCAACGCCACCAGGTTCGCCAGCGTGT | |
| | ACGCCTGGAACAGGAAGAGGATCAGCAACTGCGTGGCCGACTACAGC | |
| | GTGCTGTACAACAGCGCCAGCTTCAGCACCTTCAAGTGCTACGGCGTG | |
| | AGCCCCACCAAGCTGAACGACCTGTGCTTCACCAACGTGTACGCCGAC | |
| | AGCTTCGTGATCAGGGGCGACGAGGTGAGGCAGATCGCCCCCGGCCA | |
| | GACCGGCAAGATCGCCGACTACAACTACAAGCTGCCCGACGACTTCAC | |
| | CGGCTGCGTGATCGCCTGGAACAGCAACAACCTGGACAGCAAGGTGG | |
| | GCGGCAACTACAACTACCTGTACAGGCTGTTCAGGAAGAGCAACCTGA | |
| | AGCCCTTCGAGAGGGACATCAGCACCGAGATCTACCAGGCCGGCAGC | |
| | ACCCCCTGCAACGGCGTGGAGGGCTTCAACTGCTACTTCCCCCTGCAG | |
| | AGCTACGGCTTCCAGCCCACCAACGGCGTGGGCTACCAGCCCTACAG | |
| | GGTGGTGGTGCTGAGCTTCGAGCTGCTGCACGCCCCCGCCACCGTGT | |
| | GCGGCCCCAAGAAGAGCACCAACCTGGTGAAGAACAAGTGCGTGAACT | |
| | TCAACTTCAACGGCCTGACCGGCACCGGCGTGCTGACCGAGAGCAACA | |
| | AGAAGTTCCTGCCCTTCCAGCAGTTCGGCAGGGACATCGCCGACACCA | |
| | CCGACGCCGTGAGGGACCCCCAGACCCTGGAGATCCTGGACATCACC | |
| | CCCTGCAGCTTCGGCGGCGTGAGCGTGATCACCCCCGGCACCAACAC | |
| | CAGCAACCAGGTGGCCGTGCTGTACCAGGACGTGAACTGCACCGAGG | |
| | TGCCCGTGGCCATCCACGCCGACCAGCTGACCCCCACCTGGAGGGTG | |
| | TACAGCACCGGCAGCAACGTGTTCCAGACCAGGGCCGGCTGCCTGAT | |
| | CGGCGCCGAGCACGTGAACAACAGCTACGAGTGCGACATCCCCATCG | |
| | GCGCCGGCATCTGCGCCAGCTACCAGACCCAGACCAACAGCCCCGGC | |
| | AGCGCCAGCAGCGTGGCCAGCCAGAGCATCATCGCCTACACCATGAG | |
| | CCTGGGCGCCGAGAACAGCGTGGCCTACAGCAACAACAGCATCGCCA | |
| | TCCCCACCAACTTCACCATCAGCGTGACCACCGAGATCCTGCCCGTGA | |
| | GCATGACCAAGACCAGCGTGGACTGCACCATGTACATCTGCGGCGACA | |
| | GCACCGAGTGCAGCAACCTGCTGCTGCAGTACGGCAGCTTCTGCACCC | |
| | AGCTGAACAGGGCCCTGACCGGCATCGCCGTGGAGCAGGACAAGAAC | |
| | ACCCAGGAGGTGTTCGCCCAGGTGAAGCAGATCTACAAGACCCCCCCC | |
| | ATCAAGGACTTCGGCGGCTTCAACTTCAGCCAGATCCTGCCCGACCCC | |
| | AGCAAGCCCAGCAAGAGGAGCCCCATCGAGGACCTGCTGTTCAACAAG | |
| | GTGACCCTGGCCGACGCCGGCTTCATCAAGCAGTACGGCGACTGCCT | |
| | GGGCGACATCGCCGCCAGGGACCTGATCTGCGCCCAGAAGTTCAACG | |
| | GCCTGACCGTGCTGCCCCCCCTGCTGACCGACGAGATGATCGCCCAG | |
| | TACACCAGCGCCCTGCTGGCCGGCACCATCACCAGCGGCTGGACCTT | |
| | CGGCGCCGGCCCCGCCCTGCAGATCCCCTTCCCCATGCAGATGGCCT | |
| | ACAGGTTCAACGGCATCGGCGTGACCCAGAACGTGCTGTACGAGAACC | |
| | AGAAGCTGATCGCCAACCAGTTCAACAGCGCCATCGGCAAGATCCAGG | |
| | ACAGCCTGAGCAGCACCCCCAGCGCCCTGGGCAAGCTGCAGGACGTG | |
| | GTGAACCAGAACGCCCAGGCCCTGAACACCCTGGTGAAGCAGCTGAG | |
| | CAGCAACTTCGGCGCCATCAGCAGCGTGCTGAACGACATCCTGAGCAG | |
| | GCTGGACCCCCCCGAGGCCGAGGTGCAGATCGACAGGCTGATCACCG | |
| | GCAGGCTGCAGAGCCTGCAGACCTACGTGACCCAGCAGCTGATCAGG | |
| | GCCGCCGAGATCAGGGCCAGCGCCAACCTGGCCGCCACCAAGATGAG | |
| | CGAGTGCGTGCTGGGCCAGAGCAAGAGGGTGGACTTCTGCGGCAAGG | |
| | GCTACCACCTGATGAGCTTCCCCCAGAGCGCCCCCCACGGCGTGGTG | |
| | TTCCTGCACGTGACCTACGTGCCCGCCCAGGAGAAGAACTTCACCACC | |
| | GCCCCCGCCATCTGCCACGACGGCAAGGCCCACTTCCCCAGGGAGGG | |
| | CGTGTTCGTGAGCAACGGCACCCACTGGTTCGTGACCCAGAGGAACTT | |
| | CTACGAGCCCCAGATCATCACCACCGACAACACCTTCGTGAGCGGCAA | |
| | CTGCGACGTGGTGATCGGCATCGTGAACAACACCGTGTACGACCCCCT | |
| | GCAGCCCGAGCTGGACAGCTTCAAGGAGGAGCTGGACAAGTACTTCAA | |
| | GAACCACACCAGCCCCGACGTGGACCTGGGCGACATCAGCGGCATCA | |
| | ACGCCAGCGTGGTGAACATCCAGAAGGAGATCGACAGGCTGAACGAG | |
| | GTGGCCAAGAACCTGAACGAGAGCCTGATCGACCTGCAGGAGCTGGG | |
| | CAAGTACGAGCAGTACATCAAGTGGCCCTGGTACATCTGGCTGGGCTT | |
| | CATCGCCGGCCTGATCGCCATCGTGATGGTGACCATCATGCTGTGCTG | |
| | CATGACCAGCTGCTGCAGCTGCCTGAAGGGCTGCTGCAGCTGCGGCA | |
| | GCTGCTGCAAGTTCGACGAGGACGACAGCGAGCCCGTGCTGAAGGGC | |
| | GTGAAGCTGCACTACACCTGATGA | |
| 56 | ATGTTCGTGTTCCTGGTGCTGCTGCCCCTGGTGAGCAGCCAGTGCGTG | 341 |
| Pan-CoV (B4) | AACCTGACCACCAGGACCCAGCTGCCCCCCGCCTACACCAACAGCTTC | |
| | ACCAGGGGCGTGTACTACCCCGACAAGGTGTTCAGGAGCAGCGTGCT | |
| | GCACAGCACCCAGGACCTGTTCCTGCCCTTCTTCAGCAACGTGACCTG | |
| | GTTCCACGCCATCCACGTGAGCGGCACCAACGGCACCAAGAGGTTCGA | |
| | CAACCCCGTGCTGCCCTTCAACGACGGCGTGTACTTCGCCAGCACCGA | |
| | GAAGAGCAACATCATCAGGGGCTGGATCTTCGGCACCACCCTGGACAG | |
| | CAAGACCCAGAGCCTGCTGATCGTGAACAACGCCACCAACGTGGTGAT | |
| | CAAGGTGTGCGAGTTCCAGTTCTGCAACGACCCCTTCCTGGGCGTGTA | |
| | CTACCACAAGAACAACAAGAGCTGGATGGAGAGCGAGTTCAGGGTGTA | |
| | CAGCAGCGCCAACAACTGCACCTTCGAGTACGTGAGCCAGCCCTTCCT | |
| | GATGGACCTGGAGGGCAAGCAGGGCAACTTCAAGAACCTGAGGGAGT | |
| | TCGTGTTCAAGAACATCGACGGCTACTTCAAGATCTACAGCAAGCACAC | |
| | CCCCATCAACCTGGTGAGGGACCTGCCCCAGGGCTTCAGCGCCCTGG | |
| | AGCCCCTGGTGGACCTGCCCATCGGCATCAACATCACCAGGTTCCAGA | |
| | CCCTGCTGGCCCTGCACAGGAGCTACCTGACCCCCGGCGACAGCAGC | |
| | AGCGGCTGGACCGCCGGCGCCGCCGCCTACTACGTGGGCTACCTGCA | |
| | GCCCAGGACCTTCCTGCTGAAGTACAACGAGAACGGCACCATCACCGA | |
| | CGCCGTGGACTGCGCCCTGGACCCCCTGAGCGAGACCAAGTGCACCC | |
| | TGAAGAGCTTCACCGTGGAGAAGGGCATCTACCAGACCAGCAACTTCA | |
| | GGGTGCAGCCCACCGAGAGCATCGTGAGGTTCCCCAACATCACCAACC | |
| | TGTGCCCCTTCGGCGAGGTGTTCAACGCCACCAGGTTCGCCAGCGTGT | |
| | ACGCCTGGAACAGGAAGAGGATCAGCAACTGCGTGGCCGACTACAGC | |
| | GTGCTGTACAACAGCGCCAGCTTCAGCACCTTCAAGTGCTACGGCGTG | |
| | AGCCCCACCAAGCTGAACGACCTGTGCTTCACCAACGTGTACGCCGAC | |
| | AGCTTCGTGATCAGGGGCGACGAGGTGAGGCAGATCGCCCCCGGCCA | |
| | GACCGGCAAGATCGCCGACTACAACTACAAGCTGCCCGACGACTTCAC | |
| | CGGCTGCGTGATCGCCTGGAACAGCAACAACCTGGACAGCAAGGTGG | |
| | GCGGCAACTACAACTACCTGTACAGGCTGTTCAGGAAGAGCAACCTGA | |
| | AGCCCTTCGAGAGGGACATCAGCACCGAGATCTACCAGGCCGGCAGC | |
| | ACCCCCTGCAACGGCGTGGAGGGCTTCAACTGCTACTTCCCCCTGCAG | |
| | AGCTACGGCTTCCAGCCCACCAACGGCGTGGGCTACCAGCCCTACAG | |
| | GGTGGTGGTGCTGAGCTTCGAGCTGCTGCACGCCCCCGCCACCGTGT | |
| | GCGGCCCCAAGAAGAGCACCAACCTGGTGAAGAACAAGTGCGTGAACT | |
| | TCAACTTCAACGGCCTGACCGGCACCGGCGTGCTGACCGAGAGCAACA | |
| | AGAAGTTCCTGCCCTTCCAGCAGTTCGGCAGGGACATCGCCGACACCA | |
| | CCGACGCCGTGAGGGACCCCCAGACCCTGGAGATCCTGGACATCACC | |
| | CCCTGCAGCTTCGGCGGCGTGAGCGTGATCACCCCCGGCACCAACAC | |
| | CAGCAACCAGGTGGCCGTGCTGTACCAGGACGTGAACTGCACCGAGG | |
| | TGCCCGTGGCCATCCACGCCGACCAGCTGACCCCCACCTGGAGGGTG | |
| | TACAGCACCGGCAGCAACGTGTTCCAGACCAGGGCCGGCTGCCTGAT | |
| | CGGCGCCGAGCACGTGAACAACAGCTACGAGTGCGACATCCCCATCG | |
| | GCGCCGGCATCTGCGCCAGCTACCAGACCCAGACCAACAGCCCCGGC | |
| | AGCGCCAGCAGCGTGGCCAGCCAGAGCATCATCGCCTACACCATGAG | |
| | CCTGGGCGCCGAGAACAGCGTGGCCTACAGCAACAACAGCATCGCCA | |
| | TCCCCACCAACTTCACCATCAGCGTGACCACCGAGATCCTGCCCGTGA | |
| | GCATGACCAAGACCAGCGTGGACTGCACCATGTACATCTGCGGCGACA | |
| | GCACCGAGTGCAGCAACCTGCTGCTGCAGTACGGCAGCTTCTGCACCC | |
| | AGCTGAACAGGGCCCTGACCGGCATCGCCGTGGAGCAGGACAAGAAC | |
| | ACCCAGGAGGTGTTCGCCCAGGTGAAGCAGATCTACAAGACCCCCCCC | |
| | ATCAAGGACTTCGGCGGCTTCAACTTCAGCCAGATCCTGCCCGACCCC | |
| | AGCAAGCCCAGCAAGAGGAGCCCCATCGAGGACCTGCTGTTCAACAAG | |
| | GTGACCCTGGCCGACGCCGGCTTCATCAAGCAGTACGGCGACTGCCT | |
| | GGGCGACATCGCCGCCAGGGACCTGATCTGCGCCCAGAAGTTCAACG | |
| | GCCTGACCGTGCTGCCCCCCCTGCTGACCGACGAGATGATCGCCCAG | |
| | TACACCAGCGCCCTGCTGGCCGGCACCATCACCAGCGGCTGGACCTT | |
| | CGGCGCCGGCCCCGCCCTGCAGATCCCCTTCCCCATGCAGATGGCCT | |
| | ACAGGTTCAACGGCATCGGCGTGACCCAGAACGTGCTGTACGAGAACC | |
| | AGAAGCTGATCGCCAACCAGTTCAACAGCGCCATCGGCAAGATCCAGG | |
| | ACAGCCTGAGCAGCACCCCCAGCGCCCTGGGCAAGCTGCAGGACGTG | |
| | GTGAACCAGAACGCCCAGGCCCTGAACACCCTGGTGAAGCAGCTGAG | |
| | CAGCAACTTCGGCGCCATCAGCAGCGTGCTGAACGACATCCTGAGCAG | |
| | GCTGGACCCCCCCGAGGCCGAGGTGCAGATCGACAGGCTGATCACCG | |
| | GCAGGCTGCAGAGCCTGCAGACCTACGTGACCCAGCAGCTGATCAGG | |
| | GCCGCCGAGATCAGGGCCAGCGCCAACCTGGCCGCCACCAAGATGAG | |
| | CGAGTGCGTGCTGGGCCAGAGCAAGAGGGTGGACTTCTGCGGCAAGG | |
| | GCTACCACCTGATGAGCTTCCCCCAGAGCGCCCCCCACGGCGTGGTG | |
| | TTCCTGCACGTGACCTACGTGCCCGCCCAGGAGAAGAACTTCACCACC | |
| | GCCCCCGCCATCTGCCACGACGGCAAGGCCCACTTCCCCAGGGAGGG | |
| | CGTGTTCGTGAGCAACGGCACCCACTGGTTCGTGACCCAGAGGAACTT | |
| | CTACGAGCCCCAGATCATCACCACCGACAACACCTTCGTGAGCGGCAA | |
| | CTGCGACGTGGTGATCGGCATCGTGAACAACACCGTGTACGACCCCCT | |
| | GCAGCCCGAGCTGGACAGCTTCAAGGAGGAGCTGGACAAGTACTTCAA | |
| | GAACCACACCAGCCCCGACGTGGACCTGGGCGACATCAGCGGCATCA | |
| | ACGCCAGCGTGGTGAACATCCAGAAGGAGATCGACAGGCTGAACGAG | |
| | GTGGCCAAGAACCTGAACGAGAGCCTGATCGACCTGCAGGAGCTGGG | |
| | CAAGTACGAGCAGTACATCAAGTGGCCCTGGTACATCTGGCTGGGCTT | |
| | CATCGCCGGCCTGATCGCCATCGTGATGGTGACCATCATGCTGTGCTG | |
| | CATGACCAGCTGCTGCAGCTGCCTGAAGGGCTGCTGCAGCTGCGGCA | |
| | GCTGCTGCAAGTTCGACGAGGACGACAGCGAGCCCGTGCTGAAGGGC | |
| | GTGAAGCTGCACTACACCGGAAGCGGAGCCACGAACTTCTCTCTGTTA | |
| | AAGCAAGCAGGAGATGTTGAAGAAAACCCCGGGCCTGACCAGGAACCC | |
| | CGCCTGGAGGAAGGCCGTGTTCATCAGCCCCTACAACAGCCAGAACGC | |
| | CGTGGCCAGCAAGATCCTGGGCCTGCCCACCCAGACCGTGGACAGCA | |
| | GCCAGGGCAGCGAGTACGACTACGTGATCTTCACCCAGACCACCGAGA | |
| | CCGCCCACAGCTGCAACGTGAACAGGTTCAACGTGGCCATCACCAGGG | |
| | CCAAGGTGGGCATCCTGTGCATCATGAGCGACAGGGACCTGTACGACA | |
| | AGCTGCAGTTCACCAGCCTGGAGATCCCCAGGAGGAACGTGGCCACC | |
| | CTGCAGGCCGAGAACGTGACCGGCCTGTTCAAGGACTGCAGCAAGGT | |
| | GATCACCGGCCTGCACCCCACCCAGGCCCCCACCCACCTGAGCGTGG | |
| | ACACCAAGTTCAAGACCGAGGGCCTGTGCGTGGACATCCCCGGCATCC | |
| | CCAAGGACATGACCTACAGGAGGCTGATCAGCATGATGGGCTTCAAGA | |
| | TGAACTACCAGGTGAACGGCTACCCCAACATGTTCATCACCAGGGAGG | |
| | AGGCCATCAGGCACGTGAGGGCCTGGATCGGCTTCGACGTGGAGGGC | |
| | TGCCACGCCACCAGGGAGGCCGTGGGCACCAACCTGCCCCTGCAGCT | |
| | GGGCTTCAGCACCGGCGTGAACCTGGTGGCCGTGCCCACCGGCTACG | |
| | TGGACACCCCCAACAACACCGACTTCAGCAGGGTGAGCGCCAAGCCC | |
| | CCCCCCGGCGACCAGTTCAAGCACCTGATCCCCCTGATGTACAAGGGC | |
| | CTGCCCTGGAACGTGGTGAGGATCAAGATCGTGCAGATGCTGAGCGAC | |
| | ACCCTGAAGAACCTGAGCGACAGGGTGGTGTTCGTGCTGTGGGCCCA | |
| | CGGCTTCGAGCTGACCAGCATGAAGTACTTCGTGAAGATCGGCCCCGA | |
| | GAGGACCTGCTGCCTGTGCGACAGGAGGGCCACCTGCTTCAGCACCG | |
| | CCAGCGACACCTACGCCTGCTGGCACCACAGCATCGGCTTCGACTACG | |
| | TGTACAACCCCTTCATGATCGACGTGCAGCAGTGGGGCTTCACCGGCA | |
| | ACCTGCAGAGCAACCACGACCTGTACTGCCAGGTGCACGGCAACGCC | |
| | CACGTGGCCAGCTGCGACGCCATCATGACCAGGTGCCTGGCCGTGCA | |
| | CGAGTGCTTCGTGAAGAGGGTGGACTGGACCATCGAGTACCCCATCAT | |
| | CGGCGACGAGCTGAAGATCAACGCCGCCTGCAGGAAGGTGCAGCACA | |
| | TGGTGGTGAAGGCCGCCCTGCTGGCCGACAAGTTCCCCGTGCTGCAC | |
| | GACATCGGCAACCCCAAGGCCATCAAGTGCGTGCCCCAGGCCGACGT | |
| | GGAGTGGAAGTTCTACGACGCCCAGCCCTGCAGCGACAAGGCCTACAA | |
| | GATCGAGGAGCTGTTCTACAGCTACGCCACCCACAGCGACAAGTTCAC | |
| | CGACGGCGTGTGCCTGTTCTGGAACTGCAACGTGGACAGGTACCCCG | |
| | CCAACAGCATCGTGTGCAGGTTCGACACCAGGGTGCTGAGCAACCTGA | |
| | ACCTGCCCGGCTGCGACGGCGGCAGCCTGTACGTGAACAAGCACGCC | |
| | TTCCACACCCCCGCCTTCGACAAGAGCGCCTTCGTGAACCTGAAGCAG | |
| | CTGCCCTTCTTCTACTACAGCGACAGCCCCTGCGAGAGCCACGGCAAG | |
| | CAGGTGGTGAGCGACATCGACTACGTGCCCCTGAAGAGCGCCACCTG | |
| | CATCACCAGGTGCAACCTGGGCGGCGCCGTGTGCAGGCACCACGCCA | |
| | ACGAGTACAGGCTGTACCTGGACGCCTACAACATGATGATCAGCGCCG | |
| | GCTTCAGCCTGTGGGTGTACAAGCAGTTCGACACCTACAACCTGTGGA | |
| | ACACCTTCACCAGGCTGCAGAGCCTGGAGAACGTGGCCTTCAACGTGG | |
| | TGAACAAGGGCCACTTCGACGGCCAGCAGGGCGAGGTGCCCGTGAGC | |
| | ATCATCAACAACACCGTGTACACCAAGGTGGACGGCGTGGACGTGGAG | |
| | CTGTTCGAGAACAAGACCACCCTGCCCGTGAACGTGGCCTTCGAGCTG | |
| | TGGGCCAAGAGGAACATCAAGCCCGTGCCCGAGGTGAAGATCCTGAAC | |
| | AACCTGGGCGTGGACATCGCCGCCAACACCGTGATCTGGGACTACAAG | |
| | AGGGACGCCCCCGCCCACATCAGCACCATCGGCGTGTGCAGCATGAC | |
| | CGACATCGCCAAGAAGCCCACCGAGACCATCTGCGCCCCCCTGACCGT | |
| | GTTCTTCGACGGCAGGGTGGACGGCCAGGTGGACCTGTTCAGGAACG | |
| | CCAGGAACGGCGTGCTGATCACCGAGGGCAGCGTGAAGGGCCTGCAG | |
| | CCCAGCGTGGGCCCCAAGCAGGCCAGCCTGAACGGCGTGACCCTGAT | |
| | CGGCGAGGCCGTGAAGACCCAGTTCAACTACTACAAGAAGGTGGACG | |
| | GCGTGGTGCAGCAGCTGCCCGAGACCTACTTCACCCAGAGCAGGAAC | |
| | CTGCAGGAGTTCAAGCCCAGGAGCCAGATGGAGATCGACTTCCTGGAG | |
| | CTGGCCATGGACGAGTTCATCGAGAGGTACAAGCTGGAGGGCTACGC | |
| | CTTCGAGCACATCGTGTACGGCGACTTCAGCCACAGCCAGCTGGGCG | |
| | GCCTGCACCTGCTGATCGGCCTGGCCAAGAGGTTCAAGGAGAGCCCC | |
| | TTCGAGCTGGAGGACTTCATCCCCATGGACAGCACCGTGAAGAACTAC | |
| | TTCATCACCGACGCCCAGACCGGCAGCAGCAAGTGCGTGTGCAGCGT | |
| | GATCGACCTGCTGCTGGACGACTTCGTGGAGATCATCAAGAGCCAGGA | |
| | CCTGAGCGTGGTGAGCAAGGTGGTGAAGGTGACCATCGACTACACCGA | |
| | GATCAGCTTCATGCTGTGGTGCAAGGACGGCCACGTGGAGACCTTCTA | |
| | CCCCAAGCTGCAGAGCAGCCAGGCCTGGCAGCCCGGCGTGGCCATGC | |
| | CCAACCTGTACAAGATGCAGAGGATGCTGCTGGAGAAGTGCGACCTGC | |
| | AGAACTACGGCGACAGCGCCACCCTGCCCAAGGGCATCATGATGAACG | |
| | TGGCCAAGTACACCCAGCTGTGCCAGTACCTGAACACCCTGACCCTGG | |
| | CCGTGCCCTACAACATGAGGGTGATCCACTTCGGCGCCGGCAGCGAC | |
| | AAGGGCGTGGCCCCCGGCACCGCCGTGCTGAGGCAGTGGCTGCCCAC | |
| | CGGCACCCTGCTGGTGGACAGCGACCTGAACGACTTCGTGAGCGACG | |
| | CCGACAGCACCCTGATCGGCGACTGCGCCACCGTGCACACCGCCAAC | |
| | AAGTGGGACCTGATCATCAGCGACATGTACGACCCCAAGACCAAGAAC | |
| | GTGACCAAGGAGAACGACAGCAAGGAGGGCTTCTTCACCTACATCTGC | |
| | GGCTTCATCCAGCAGAAGCTGGCCCTGGGCGGCAGCGTGGCCATCAA | |
| | GATCACCGAGCACAGCTGGAACGCCGACCTGTACAAGCTGATGGGCCA | |
| | CTTCGCCTGGTGGACCGCCTTCGTGACCAACGTGAACGCCAGCAGCAG | |
| | CGAGGCCTTCCTGATCGGCTGCAACTACCTGGGCAAGCCCAGGGAGC | |
| | AGATCGACGGCTACGTGATGCACGCCAACTACATCTTCTGGAGGAACA | |
| | CCAACCCCATCCAGCTGAGCAGCTACAGCCTGTTCGACATGAGCAAGT | |
| | TCCCCCTGAAGCTTGATGA | |
| 57 | ATGTTCGTGTTCCTGGTGCTGCTGCCCCTGGTGAGCAGCCAGTGCGTG | 342 |
| Pan-CoV (B5) | AACCTGACCACCAGGACCCAGCTGCCCCCCGCCTACACCAACAGCTTC | |
| | ACCAGGGGCGTGTACTACCCCGACAAGGTGTTCAGGAGCAGCGTGCT | |
| | GCACAGCACCCAGGACCTGTTCCTGCCCTTCTTCAGCAACGTGACCTG | |
| | GTTCCACGCCATCCACGTGAGCGGCACCAACGGCACCAAGAGGTTCGA | |
| | CAACCCCGTGCTGCCCTTCAACGACGGCGTGTACTTCGCCAGCACCGA | |
| | GAAGAGCAACATCATCAGGGGCTGGATCTTCGGCACCACCCTGGACAG | |
| | CAAGACCCAGAGCCTGCTGATCGTGAACAACGCCACCAACGTGGTGAT | |
| | CAAGGTGTGCGAGTTCCAGTTCTGCAACGACCCCTTCCTGGGCGTGTA | |
| | CTACCACAAGAACAACAAGAGCTGGATGGAGAGCGAGTTCAGGGTGTA | |
| | CAGCAGCGCCAACAACTGCACCTTCGAGTACGTGAGCCAGCCCTTCCT | |
| | GATGGACCTGGAGGGCAAGCAGGGCAACTTCAAGAACCTGAGGGAGT | |
| | TCGTGTTCAAGAACATCGACGGCTACTTCAAGATCTACAGCAAGCACAC | |
| | CCCCATCAACCTGGTGAGGGACCTGCCCCAGGGCTTCAGCGCCCTGG | |
| | AGCCCCTGGTGGACCTGCCCATCGGCATCAACATCACCAGGTTCCAGA | |
| | CCCTGCTGGCCCTGCACAGGAGCTACCTGACCCCCGGCGACAGCAGC | |
| | AGCGGCTGGACCGCCGGCGCCGCCGCCTACTACGTGGGCTACCTGCA | |
| | GCCCAGGACCTTCCTGCTGAAGTACAACGAGAACGGCACCATCACCGA | |
| | CGCCGTGGACTGCGCCCTGGACCCCCTGAGCGAGACCAAGTGCACCC | |
| | TGAAGAGCTTCACCGTGGAGAAGGGCATCTACCAGACCAGCAACTTCA | |
| | GGGTGCAGCCCACCGAGAGCATCGTGAGGTTCCCCAACATCACCAACC | |
| | TGTGCCCCTTCGGCGAGGTGTTCAACGCCACCAGGTTCGCCAGCGTGT | |
| | ACGCCTGGAACAGGAAGAGGATCAGCAACTGCGTGGCCGACTACAGC | |
| | GTGCTGTACAACAGCGCCAGCTTCAGCACCTTCAAGTGCTACGGCGTG | |
| | AGCCCCACCAAGCTGAACGACCTGTGCTTCACCAACGTGTACGCCGAC | |
| | AGCTTCGTGATCAGGGGCGACGAGGTGAGGCAGATCGCCCCCGGCCA | |
| | GACCGGCAAGATCGCCGACTACAACTACAAGCTGCCCGACGACTTCAC | |
| | CGGCTGCGTGATCGCCTGGAACAGCAACAACCTGGACAGCAAGGTGG | |
| | GCGGCAACTACAACTACCTGTACAGGCTGTTCAGGAAGAGCAACCTGA | |
| | AGCCCTTCGAGAGGGACATCAGCACCGAGATCTACCAGGCCGGCAGC | |
| | ACCCCCTGCAACGGCGTGGAGGGCTTCAACTGCTACTTCCCCCTGCAG | |
| | AGCTACGGCTTCCAGCCCACCAACGGCGTGGGCTACCAGCCCTACAG | |
| | GGTGGTGGTGCTGAGCTTCGAGCTGCTGCACGCCCCCGCCACCGTGT | |
| | GCGGCCCCAAGAAGAGCACCAACCTGGTGAAGAACAAGTGCGTGAACT | |
| | TCAACTTCAACGGCCTGACCGGCACCGGCGTGCTGACCGAGAGCAACA | |
| | AGAAGTTCCTGCCCTTCCAGCAGTTCGGCAGGGACATCGCCGACACCA | |
| | CCGACGCCGTGAGGGACCCCCAGACCCTGGAGATCCTGGACATCACC | |
| | CCCTGCAGCTTCGGCGGCGTGAGCGTGATCACCCCCGGCACCAACAC | |
| | CAGCAACCAGGTGGCCGTGCTGTACCAGGACGTGAACTGCACCGAGG | |
| | TGCCCGTGGCCATCCACGCCGACCAGCTGACCCCCACCTGGAGGGTG | |
| | TACAGCACCGGCAGCAACGTGTTCCAGACCAGGGCCGGCTGCCTGAT | |
| | CGGCGCCGAGCACGTGAACAACAGCTACGAGTGCGACATCCCCATCG | |
| | GCGCCGGCATCTGCGCCAGCTACCAGACCCAGACCAACAGCCCCGGC | |
| | AGCGCCAGCAGCGTGGCCAGCCAGAGCATCATCGCCTACACCATGAG | |
| | CCTGGGCGCCGAGAACAGCGTGGCCTACAGCAACAACAGCATCGCCA | |
| | TCCCCACCAACTTCACCATCAGCGTGACCACCGAGATCCTGCCCGTGA | |
| | GCATGACCAAGACCAGCGTGGACTGCACCATGTACATCTGCGGCGACA | |
| | GCACCGAGTGCAGCAACCTGCTGCTGCAGTACGGCAGCTTCTGCACCC | |
| | AGCTGAACAGGGCCCTGACCGGCATCGCCGTGGAGCAGGACAAGAAC | |
| | ACCCAGGAGGTGTTCGCCCAGGTGAAGCAGATCTACAAGACCCCCCCC | |
| | ATCAAGGACTTCGGCGGCTTCAACTTCAGCCAGATCCTGCCCGACCCC | |
| | AGCAAGCCCAGCAAGAGGAGCCCCATCGAGGACCTGCTGTTCAACAAG | |
| | GTGACCCTGGCCGACGCCGGCTTCATCAAGCAGTACGGCGACTGCCT | |
| | GGGCGACATCGCCGCCAGGGACCTGATCTGCGCCCAGAAGTTCAACG | |
| | GCCTGACCGTGCTGCCCCCCCTGCTGACCGACGAGATGATCGCCCAG | |
| | TACACCAGCGCCCTGCTGGCCGGCACCATCACCAGCGGCTGGACCTT | |
| | CGGCGCCGGCCCCGCCCTGCAGATCCCCTTCCCCATGCAGATGGCCT | |
| | ACAGGTTCAACGGCATCGGCGTGACCCAGAACGTGCTGTACGAGAACC | |
| | AGAAGCTGATCGCCAACCAGTTCAACAGCGCCATCGGCAAGATCCAGG | |
| | ACAGCCTGAGCAGCACCCCCAGCGCCCTGGGCAAGCTGCAGGACGTG | |
| | GTGAACCAGAACGCCCAGGCCCTGAACACCCTGGTGAAGCAGCTGAG | |
| | CAGCAACTTCGGCGCCATCAGCAGCGTGCTGAACGACATCCTGAGCAG | |
| | GCTGGACCCCCCCGAGGCCGAGGTGCAGATCGACAGGCTGATCACCG | |
| | GCAGGCTGCAGAGCCTGCAGACCTACGTGACCCAGCAGCTGATCAGG | |
| | GCCGCCGAGATCAGGGCCAGCGCCAACCTGGCCGCCACCAAGATGAG | |
| | CGAGTGCGTGCTGGGCCAGAGCAAGAGGGTGGACTTCTGCGGCAAGG | |
| | GCTACCACCTGATGAGCTTCCCCCAGAGCGCCCCCCACGGCGTGGTG | |
| | TTCCTGCACGTGACCTACGTGCCCGCCCAGGAGAAGAACTTCACCACC | |
| | GCCCCCGCCATCTGCCACGACGGCAAGGCCCACTTCCCCAGGGAGGG | |
| | CGTGTTCGTGAGCAACGGCACCCACTGGTTCGTGACCCAGAGGAACTT | |
| | CTACGAGCCCCAGATCATCACCACCGACAACACCTTCGTGAGCGGCAA | |
| | CTGCGACGTGGTGATCGGCATCGTGAACAACACCGTGTACGACCCCCT | |
| | GCAGCCCGAGCTGGACAGCTTCAAGGAGGAGCTGGACAAGTACTTCAA | |
| | GAACCACACCAGCCCCGACGTGGACCTGGGCGACATCAGCGGCATCA | |
| | ACGCCAGCGTGGTGAACATCCAGAAGGAGATCGACAGGCTGAACGAG | |
| | GTGGCCAAGAACCTGAACGAGAGCCTGATCGACCTGCAGGAGCTGGG | |
| | CAAGTACGAGCAGTACATCAAGTGGCCCTGGTACATCTGGCTGGGCTT | |
| | CATCGCCGGCCTGATCGCCATCGTGATGGTGACCATCATGCTGTGCTG | |
| | CATGACCAGCTGCTGCAGCTGCCTGAAGGGCTGCTGCAGCTGCGGCA | |
| | GCTGCTGCAAGTTCGACGAGGACGACAGCGAGCCCGTGCTGAAGGGC | |
| | GTGAAGCTGCACTACACCGGAAGCGGAGCCACGAACTTCTCTCTGTTA | |
| | AAGCAAGCAGGAGATGTTGAAGAAAACCCCGGGCCTATGTACAGCTTC | |
| | GTGAGCGAGGAGACCGGCACCCTGATCGTGAACAGCGTGCTGCTGTT | |
| | CCTGGCCTTCGTGGTGTTCCTGCTGGTGACCCTGGCCATCCTGACCGC | |
| | CCTGAGGCTGTGCGCCTACTGCTGCAACATCGTGAACGTGAGCCTGGT | |
| | GAAGCCCAGCTTCTACGTGTACAGCAGGGTGAAGAACCTGAACAGCAG | |
| | CAGGGTGCCCGACCTGCTGGTGGGAAGCGGAGCCACGAACTTCTCTC | |
| | TGTTAAAGCAAGCAGGAGATGTTGAAGAAAACCCCGGGCCTATGGCCG | |
| | ACAGCAACGGCACCATCACCGTGGAGGAGCTGAAGAAGCTGCTGGAG | |
| | CAGTGGAACCTGGTGATCGGCTTCCTGTTCCTGACCTGGATCTGCCTG | |
| | CTGCAGTTCGCCTACGCCAACAGGAACAGGTTCCTGTACATCATCAAG | |
| | CTGATCTTCCTGTGGCTGCTGTGGCCCGTGACCCTGGCCTGCTTCGTG | |
| | CTGGCCGCCGTGTACAGGATCAACTGGATCACCGGCGGCATCGCCATC | |
| | GCCATGGCCTGCCTGGTGGGCCTGATGTGGCTGAGCTACTTCATCGCC | |
| | AGCTTCAGGCTGTTCGCCAGGACCAGGAGCATGTGGAGCTTCAACCCC | |
| | GAGACCAACATCCTGCTGAACGTGCCCCTGCACGGCACCATCCTGACC | |
| | AGGCCCCTGCTGGAGAGCGAGCTGGTGATCGGCGCCGTGATCCTGAG | |
| | GGGCCACCTGAGGATCGCCGGCCACCACCTGGGCAGGTGCGACATCA | |
| | AGGACCTGCCCAAGGAGATCACCGTGGCCACCAGCAGGACCCTGAGC | |
| | TACTACAAGCTGGGCGCCAGCCAGAGGGTGGCCGGCGACAGCGGCTT | |
| | CGCCGCCTACAGCAGGTACAGGATCGGCAACTACAAGCTGAACACCGA | |
| | CCACAGCAGCAGCAGCGACAACATCGCCCTGCTGGTGCAGGGAAGCG | |
| | GAGCCACGAACTTCTCTCTGTTAAAGCAAGCAGGAGATGTTGAAGAAAA | |
| | CCCCGGGCCTATGAAGATCATCCTGTTCCTGGCCCTGATCACCCTGGC | |
| | CACCTGCGAGCTGTACCACTACCAGGAGTGCGTGAGGGGCACCACCG | |
| | TGTGATGA | |
| 58 | ATGTTCGTGTTCCTGGTGCTGCTGCCCCTGGTGAGCAGCCAGTGCGTG | 343 |
| Pan-CoV (B6) | AACCTGACCACCAGGACCCAGCTGCCCCCCGCCTACACCAACAGCTTC | |
| | ACCAGGGGCGTGTACTACCCCGACAAGGTGTTCAGGAGCAGCGTGCT | |
| | GCACAGCACCCAGGACCTGTTCCTGCCCTTCTTCAGCAACGTGACCTG | |
| | GTTCCACGCCATCCACGTGAGCGGCACCAACGGCACCAAGAGGTTCGA | |
| | CAACCCCGTGCTGCCCTTCAACGACGGCGTGTACTTCGCCAGCACCGA | |
| | GAAGAGCAACATCATCAGGGGCTGGATCTTCGGCACCACCCTGGACAG | |
| | CAAGACCCAGAGCCTGCTGATCGTGAACAACGCCACCAACGTGGTGAT | |
| | CAAGGTGTGCGAGTTCCAGTTCTGCAACGACCCCTTCCTGGGCGTGTA | |
| | CTACCACAAGAACAACAAGAGCTGGATGGAGAGCGAGTTCAGGGTGTA | |
| | CAGCAGCGCCAACAACTGCACCTTCGAGTACGTGAGCCAGCCCTTCCT | |
| | GATGGACCTGGAGGGCAAGCAGGGCAACTTCAAGAACCTGAGGGAGT | |
| | TCGTGTTCAAGAACATCGACGGCTACTTCAAGATCTACAGCAAGCACAC | |
| | CCCCATCAACCTGGTGAGGGACCTGCCCCAGGGCTTCAGCGCCCTGG | |
| | AGCCCCTGGTGGACCTGCCCATCGGCATCAACATCACCAGGTTCCAGA | |
| | CCCTGCTGGCCCTGCACAGGAGCTACCTGACCCCCGGCGACAGCAGC | |
| | AGCGGCTGGACCGCCGGCGCCGCCGCCTACTACGTGGGCTACCTGCA | |
| | GCCCAGGACCTTCCTGCTGAAGTACAACGAGAACGGCACCATCACCGA | |
| | CGCCGTGGACTGCGCCCTGGACCCCCTGAGCGAGACCAAGTGCACCC | |
| | TGAAGAGCTTCACCGTGGAGAAGGGCATCTACCAGACCAGCAACTTCA | |
| | GGGTGCAGCCCACCGAGAGCATCGTGAGGTTCCCCAACATCACCAACC | |
| | TGTGCCCCTTCGGCGAGGTGTTCAACGCCACCAGGTTCGCCAGCGTGT | |
| | ACGCCTGGAACAGGAAGAGGATCAGCAACTGCGTGGCCGACTACAGC | |
| | GTGCTGTACAACAGCGCCAGCTTCAGCACCTTCAAGTGCTACGGCGTG | |
| | AGCCCCACCAAGCTGAACGACCTGTGCTTCACCAACGTGTACGCCGAC | |
| | AGCTTCGTGATCAGGGGCGACGAGGTGAGGCAGATCGCCCCCGGCCA | |
| | GACCGGCAAGATCGCCGACTACAACTACAAGCTGCCCGACGACTTCAC | |
| | CGGCTGCGTGATCGCCTGGAACAGCAACAACCTGGACAGCAAGGTGG | |
| | GCGGCAACTACAACTACCTGTACAGGCTGTTCAGGAAGAGCAACCTGA | |
| | AGCCCTTCGAGAGGGACATCAGCACCGAGATCTACCAGGCCGGCAGC | |
| | ACCCCCTGCAACGGCGTGGAGGGCTTCAACTGCTACTTCCCCCTGCAG | |
| | AGCTACGGCTTCCAGCCCACCAACGGCGTGGGCTACCAGCCCTACAG | |
| | GGTGGTGGTGCTGAGCTTCGAGCTGCTGCACGCCCCCGCCACCGTGT | |
| | GCGGCCCCAAGAAGAGCACCAACCTGGTGAAGAACAAGTGCGTGAACT | |
| | TCAACTTCAACGGCCTGACCGGCACCGGCGTGCTGACCGAGAGCAACA | |
| | AGAAGTTCCTGCCCTTCCAGCAGTTCGGCAGGGACATCGCCGACACCA | |
| | CCGACGCCGTGAGGGACCCCCAGACCCTGGAGATCCTGGACATCACC | |
| | CCCTGCAGCTTCGGCGGCGTGAGCGTGATCACCCCCGGCACCAACAC | |
| | CAGCAACCAGGTGGCCGTGCTGTACCAGGACGTGAACTGCACCGAGG | |
| | TGCCCGTGGCCATCCACGCCGACCAGCTGACCCCCACCTGGAGGGTG | |
| | TACAGCACCGGCAGCAACGTGTTCCAGACCAGGGCCGGCTGCCTGAT | |
| | CGGCGCCGAGCACGTGAACAACAGCTACGAGTGCGACATCCCCATCG | |
| | GCGCCGGCATCTGCGCCAGCTACCAGACCCAGACCAACAGCCCCGGC | |
| | AGCGCCAGCAGCGTGGCCAGCCAGAGCATCATCGCCTACACCATGAG | |
| | CCTGGGCGCCGAGAACAGCGTGGCCTACAGCAACAACAGCATCGCCA | |
| | TCCCCACCAACTTCACCATCAGCGTGACCACCGAGATCCTGCCCGTGA | |
| | GCATGACCAAGACCAGCGTGGACTGCACCATGTACATCTGCGGCGACA | |
| | GCACCGAGTGCAGCAACCTGCTGCTGCAGTACGGCAGCTTCTGCACCC | |
| | AGCTGAACAGGGCCCTGACCGGCATCGCCGTGGAGCAGGACAAGAAC | |
| | ACCCAGGAGGTGTTCGCCCAGGTGAAGCAGATCTACAAGACCCCCCCC | |
| | ATCAAGGACTTCGGCGGCTTCAACTTCAGCCAGATCCTGCCCGACCCC | |
| | AGCAAGCCCAGCAAGAGGAGCCCCATCGAGGACCTGCTGTTCAACAAG | |
| | GTGACCCTGGCCGACGCCGGCTTCATCAAGCAGTACGGCGACTGCCT | |
| | GGGCGACATCGCCGCCAGGGACCTGATCTGCGCCCAGAAGTTCAACG | |
| | GCCTGACCGTGCTGCCCCCCCTGCTGACCGACGAGATGATCGCCCAG | |
| | TACACCAGCGCCCTGCTGGCCGGCACCATCACCAGCGGCTGGACCTT | |
| | CGGCGCCGGCCCCGCCCTGCAGATCCCCTTCCCCATGCAGATGGCCT | |
| | ACAGGTTCAACGGCATCGGCGTGACCCAGAACGTGCTGTACGAGAACC | |
| | AGAAGCTGATCGCCAACCAGTTCAACAGCGCCATCGGCAAGATCCAGG | |
| | ACAGCCTGAGCAGCACCCCCAGCGCCCTGGGCAAGCTGCAGGACGTG | |
| | GTGAACCAGAACGCCCAGGCCCTGAACACCCTGGTGAAGCAGCTGAG | |
| | CAGCAACTTCGGCGCCATCAGCAGCGTGCTGAACGACATCCTGAGCAG | |
| | GCTGGACCCCCCCGAGGCCGAGGTGCAGATCGACAGGCTGATCACCG | |
| | GCAGGCTGCAGAGCCTGCAGACCTACGTGACCCAGCAGCTGATCAGG | |
| | GCCGCCGAGATCAGGGCCAGCGCCAACCTGGCCGCCACCAAGATGAG | |
| | CGAGTGCGTGCTGGGCCAGAGCAAGAGGGTGGACTTCTGCGGCAAGG | |
| | GCTACCACCTGATGAGCTTCCCCCAGAGCGCCCCCCACGGCGTGGTG | |
| | TTCCTGCACGTGACCTACGTGCCCGCCCAGGAGAAGAACTTCACCACC | |
| | GCCCCCGCCATCTGCCACGACGGCAAGGCCCACTTCCCCAGGGAGGG | |
| | CGTGTTCGTGAGCAACGGCACCCACTGGTTCGTGACCCAGAGGAACTT | |
| | CTACGAGCCCCAGATCATCACCACCGACAACACCTTCGTGAGCGGCAA | |
| | CTGCGACGTGGTGATCGGCATCGTGAACAACACCGTGTACGACCCCCT | |
| | GCAGCCCGAGCTGGACAGCTTCAAGGAGGAGCTGGACAAGTACTTCAA | |
| | GAACCACACCAGCCCCGACGTGGACCTGGGCGACATCAGCGGCATCA | |
| | ACGCCAGCGTGGTGAACATCCAGAAGGAGATCGACAGGCTGAACGAG | |
| | GTGGCCAAGAACCTGAACGAGAGCCTGATCGACCTGCAGGAGCTGGG | |
| | CAAGTACGAGCAGTACATCAAGTGGCCCTGGTACATCTGGCTGGGCTT | |
| | CATCGCCGGCCTGATCGCCATCGTGATGGTGACCATCATGCTGTGCTG | |
| | CATGACCAGCTGCTGCAGCTGCCTGAAGGGCTGCTGCAGCTGCGGCA | |
| | GCTGCTGCAAGTTCGACGAGGACGACAGCGAGCCCGTGCTGAAGGGC | |
| | GTGAAGCTGCACTACACCGGAAGCGGAGCCACGAACTTCTCTCTGTTA | |
| | AAGCAAGCAGGAGATGTTGAAGAAAACCCCGGGCCTGCCCCCACCAAG | |
| | GTGACCTTCGGCGACGACACCGTGATCGAGGTGCAGGGCTACAAGAG | |
| | CGTGAACATCACCTTCGAGCTGGACGAGAGGATCGACAAGGTGCTGAA | |
| | CGAGAAGTGCAGCGCCTACACCGTGGAGCTGGGCACCGAGGTGAACG | |
| | AGTTCGCCTGCGTGGTGGCCGACGCCGTGATCAAGACCCTGCAGCCC | |
| | GTGAGCGAGCTGCTGACCCCCCTGGGCATCGACCTGGACGAGTGGAG | |
| | CATGGCCACCTACTACCTGTTCGACGAGAGCGGCGAGTTCAAGCTGGC | |
| | CAGCCACATGTACTGCAGCTTCTACCCCCCCGACGAGGACGAGGAGGA | |
| | GGGCGACTGCGAGGAGGAGGAGTTCGAGCCCAGCACCCAGTACGAGT | |
| | ACGGCACCGAGGACGACTACCAGGGCAAGCCCCTGGAGTTCGGCGCC | |
| | ACCAGCGCCGCCCTGCAGCCCGAGGAGGAGCAGGAGGAGGACTGGC | |
| | TGGACGACGACAGCCAGCAGACCGTGGGCCAGCAGGACGGCAGCGA | |
| | GGACAACCAGACCACCACCATCCAGACCATCGTGGAGGTGCAGCCCCA | |
| | GCTGGAGATGGAGCTGACCCCCGTGGTGCAGACCATCGAGGTGAACA | |
| | GCTTCAGCGGCTACCTGAAGCTGACCGACAACGTGTACATCAAGAACG | |
| | CCGACATCGTGGAGGAGGCCAAGAAGGTGAAGCCCACCGTGGTGGTG | |
| | AACGCCGCCAACGTGTACCTGAAGCACGGCGGCGGCGTGGCCGGCGC | |
| | CCTGAACAAGGCCACCAACAACGCCATGCAGGTGGAGAGCGACGACTA | |
| | CATCGCCACCAACGGCCCCCTGAAGGTGGGCGGCAGCTGCGTGCTGA | |
| | GCGGCCACAACCTGGCCAAGCACTGCCTGCACGTGGTGGGCCCCAAC | |
| | GTGAACAAGGGCGAGGACATCCAGCTGCTGAAGAGCGCCTACGAGAA | |
| | CTTCAACCAGCACGAGGTGCTGCTGGCCCCCCTGCTGAGCGCCGGCA | |
| | TCTTCGGCGCCGACCCCATCCACAGCCTGAGGGTGTGCGTGGACACC | |
| | GTGAGGACCAACGTGTACCTGGCCGTGTTCGACAAGAACCTGTACGAC | |
| | AAGCTGGTGAGCAGCTTCCTGGAGATGAAGAGCGAGAAGCAGGTGGA | |
| | GCAGAAGATCGCCGAGATCCCCAAGGAGGAGGTGAAGCCCTTCATCAC | |
| | CGAGAGCAAGCCCAGCGTGGAGCAGAGGAAGCAGGACGACAAGAAGA | |
| | TCAAGGCCTGCGTGGAGGAGGTGACCACCACCCTGGAGGAGACCAAG | |
| | TTCCTGACCGAGAACCTGCTGCTGTACATCGACATCAACGGCAACCTG | |
| | CACCCCGACAGCGCCACCCTGGTGAGCGACATCGACATCACCTTCCTG | |
| | AAGAAGGACGCCCCCTACATCGTGGGCGACGTGGTGCAGGAGGGCGT | |
| | GCTGACCGCCGTGGTGATCCCCACCAAGAAGGCCGGCGGCACCACCG | |
| | AGATGCTGGCCAAGGCCCTGAGGAAGGTGCCCACCGACAACTACATCA | |
| | CCACCTACCCCGGCCAGGGCCTGAACGGCTACACCGTGGAGGAGGCC | |
| | AAGACCGTGCTGAAGAAGTGCAAGAGCGCCTTCTACATCCTGCCCAGC | |
| | ATCATCAGCAACGAGAAGCAGGAGATCCTGGGCACCGTGAGCTGGAAC | |
| | CTGAGGGAGATGCTGGCCCACGCCGAGGAGACCAGGAAGCTGATGCC | |
| | CGTGTGCGTGGAGACCAAGGCCATCGTGAGCACCATCCAGAGGAAGTA | |
| | CAAGGGCATCAAGATCCAGGAGGGCGTGGTGGACTACGGCGCCAGGT | |
| | TCTACTTCTACACCAGCAAGACCACCGTGGCCAGCCTGATCAACACCCT | |
| | GAACGACCTGAACGAGACCCTGGTGACCATGCCCCTGGGCTACGTGAC | |
| | CCACGGCCTGAACCTGGAGGAGGCCGCCAGGTACATGAGGAGCCTGA | |
| | AGGTGCCCGCCACCGTGAGCGTGAGCAGCCCCGACGCCGTGACCGCC | |
| | TACAACGGCTACCTGACCAGCAGCAGCAAGACCCCCGAGGAGCACTTC | |
| | ATCGAGACCATCAGCCTGGCCGGCAGCTACAAGGACTGGAGCTACAGC | |
| | GGCCAGAGCACCCAGCTGGGCATCGAGTTCCTGAAGAGGGGCGACAA | |
| | GAGCGTGTACTACACCAGCAACCCCACCACCTTCCACCTGGACGGCGA | |
| | GGTGATCACCTTCGACAACCTGAAGACCCTGCTGAGCCTGAGGGAGGT | |
| | GAGGACCATCAAGGTGTTCACCACCGTGGACAACATCAACCTGCACGG | |
| | AAGCGGAGCCACGAACTTCTCTCTGTTAAAGCAAGCAGGAGATGTTGA | |
| | AGAAAACCCCGGGCCTAGCGGCTTCAGGAAGATGGCCTTCCCCAGCG | |
| | GCAAGGTGGAGGGCTGCATGGTGCAGGTGACCTGCGGCACCACCACC | |
| | CTGAACGGCCTGTGGCTGGACGACGTGGTGTACTGCCCCAGGCACGT | |
| | GATCTGCACCAGCGAGGACATGCTGAACCCCAACTACGAGGACCTGCT | |
| | GATCAGGAAGAGCAACCACAACTTCCTGGTGCAGGCCGGCAACGTGCA | |
| | GCTGAGGGTGATCGGCCACAGCATGCAGAACTGCGTGCTGAAGCTGAA | |
| | GGTGGACACCGCCAACCCCAAGACCCCCAAGTACAAGTTCGTGAGGAT | |
| | CCAGCCCGGCCAGACCTTCAGCGTGCTGGCCTGCTACAACGGCAGCC | |
| | CCAGCGGCGTGTACCAGTGCGCCATGAGGCCCAACTTCACCATCAAGG | |
| | GCAGCTTCCTGAACGGCAGCTGCGGCAGCGTGGGCTTCAACATCGACT | |
| | ACGACTGCGTGAGCTTCTGCTACATGCACCACATGGAGCTGCCCACCG | |
| | GCGTGCACGCCGGCACCGACCTGGAGGGCAACTTCTACGGCCCCTTC | |
| | GTGGACAGGCAGACCGCCCAGGCCGCCGGCACCGACACCACCATCAC | |
| | CGTGAACGTGCTGGCCTGGCTGTACGCCGCCGTGATCAACGGCGACA | |
| | GGTGGTTCCTGAACAGGTTCACCACCACCCTGAACGACTTCAACCTGG | |
| | TGGCCATGAAGTACAACTACGAGCCCCTGACCCAGGACCACGTGGACA | |
| | TCCTGGGCCCCCTGAGCGCCCAGACCGGCATCGCCGTGCTGGACATG | |
| | TGCGCCAGCCTGAAGGAGCTGCTGCAGAACGGCATGAACGGCAGGAC | |
| | CATCCTGGGCAGCGCCCTGCTGGAGGACGAGTTCACCCCCTTCGACGT | |
| | GGTGAGGCAGTGCAGCGGCGTGACCTTCCAGGGAAGCGGAGCCACGA | |
| | ACTTCTCTCTGTTAAAGCAAGCAGGAGATGTTGAAGAAAACCCCGGGC | |
| | CTAGCGCCGACGCCCAGAGCTTCCTGAACAGGGTGTGCGGCGTGAGC | |
| | GCCGCCAGGCTGACCCCCTGCGGCACCGGCACCAGCACCGACGTGGT | |
| | GTACAGGGCCTTCGACATCTACAACGACAAGGTGGCCGGCTTCGCCAA | |
| | GTTCCTGAAGACCAACTGCTGCAGGTTCCAGGAGAAGGACGAGGACGA | |
| | CAACCTGATCGACAGCTACTTCGTGGTGAAGAGGCACACCTTCAGCAA | |
| | CTACCAGCACGAGGAGACCATCTACAACCTGCTGAAGGACTGCCCCGC | |
| | CGTGGCCAAGCACGACTTCTTCAAGTTCAGGATCGACGGCGACATGGT | |
| | GCCCCACATCAGCAGGCAGAGGCTGACCAAGTACACCATGGCCGACCT | |
| | GGTGTACGCCCTGAGGCACTTCGACGAGGGCAACTGCGACACCCTGA | |
| | AGGAGATCCTGGTGACCTACAACTGCTGCGACGACGACTACTTCAACA | |
| | AGAAGGACTGGTACGACTTCGTGGAGAACCCCGACATCCTGAGGGTGT | |
| | ACGCCAACCTGGGCGAGAGGGTGAGGCAGGCCCTGCTGAAGACCGTG | |
| | CAGTTCTGCGACGCCATGAGGAACGCCGGCATCGTGGGCGTGCTGAC | |
| | CCTGGACAACCAGGACCTGAACGGCAACTGGTACGACTTCGGCGACTT | |
| | CATCCAGACCACCCCCGGCAGCGGCGTGCCCGTGGTGGACAGCTACT | |
| | ACAGCCTGCTGATGCCCATCCTGACCCTGACCAGGGCCCTGACCGCC | |
| | GAGAGCCACGTGGACACCGACCTGACCAAGCCCTACATCAAGTGGGAC | |
| | CTGCTGAAGTACGACTTCACCGAGGAGAGGCTGAAGCTGTTCGACAGG | |
| | TACTTCAAGTACTGGGACCAGACCTACCACCCCAACTGCGTGAACTGC | |
| | CTGGACGACAGGTGCATCCTGCACTGCGCCAACTTCAACGTGCTGTTC | |
| | AGCACCGTGTTCCCCCCCACCAGCTTCGGCCCCCTGGTGAGGAAGATC | |
| | TTCGTGGACGGCGTGCCCTTCGTGGTGAGCACCGGCTACCACTTCAGG | |
| | GAGCTGGGCGTGGTGCACAACCAGGACGTGAACCTGCACAGCAGCAG | |
| | GCTGAGCTTCAAGGAGCTGCTGGTGTACGCCGCCGACCCCGCCATGC | |
| | ACGCCGCCAGCGGCAACCTGCTGCTGGACAAGAGGACCACCTGCTTC | |
| | AGCGTGGCCGCCCTGACCAACAACGTGGCCTTCCAGACCGTGAAGCC | |
| | CGGCAACTTCAACAAGGACTTCTACGACTTCGCCGTGAGCAAGGGCTT | |
| | CTTCAAGGAGGGCAGCAGCGTGGAGCTGAAGCACTTCTTCTTCGCCCA | |
| | GGACGGCAACGCCGCCATCAGCGACTACGACTACTACAGGTACAACCT | |
| | GCCCACCATGTGCGACATCAGGCAGCTGCTGTTCGTGGTGGAGGTGGT | |
| | GGACAAGTACTTCGACTGCTACGACGGCGGCTGCATCAACGCCAACCA | |
| | GGTGATCGTGAACAACCTGGACAAGAGCGCCGGCTTCCCCTTCAACAA | |
| | GTGGGGCAAGGCCAGGCTGTACTACGACAGCATGAGCTACGAGGACC | |
| | AGGACGCCCTGTTCGCCTACACCAAGAGGAACGTGATCCCCACCATCA | |
| | CCCAGATGAACCTGAAGTACGCCATCAGCGCCAAGAACAGGGCCAGGA | |
| | CCGTGGCCGGCGTGAGCATCTGCAGCACCATGACCAACAGGCAGTTC | |
| | CACCAGAAGCTGCTGAAGAGCATCGCCGCCACCAGGGGCGCCACCGT | |
| | GGTGATCGGCACCAGCAAGTTCTACGGCGGCTGGCACAACATGCTGAA | |
| | GACCGTGTACAGCGACGTGGAGAACCCCCACCTGATGGGCTGGGACT | |
| | ACCCCAAGTGCGACAGGGCCATGCCCAACATGCTGAGGATCATGGCCA | |
| | GCCTGGTGCTGGCCAGGAAGCACACCACCTGCTGCAGCCTGAGCCAC | |
| | AGGTTCTACAGGCTGGCCAACGAGTGCGCCCAGGTGCTGAGCGAGAT | |
| | GGTGATGTGCGGCGGCAGCCTGTACGTGAAGCCCGGCGGCACCAGCA | |
| | GCGGCGACGCCACCACCGCCTACGCCAACAGCGTGTTCAACATCTGCC | |
| | AGGCCGTGACCGCCAACGTGAACGCCCTGCTGAGCACCGACGGCAAC | |
| | AAGATCGCCGACAAGTACGTGAGGAACCTGCAGCACAGGCTGTACGAG | |
| | TGCCTGTACAGGAACAGGGACGTGGACACCGACTTCGTGAACGAGTTC | |
| | TACGCCTACCTGAGGAAGCACTTCAGCATGATGATCCTGAGCGACGAC | |
| | GCCGTGGTGTGCTTCAACAGCACCTACGCCAGCCAGGGCCTGGTGGC | |
| | CAGCATCAAGAACTTCAAGAGCGTGCTGTACTACCAGAACAACGTGTTC | |
| | ATGAGCGAGGCCAAGTGCTGGACCGAGACCGACCTGACCAAGGGCCC | |
| | CCACGAGTTCTGCAGCCAGCACACCATGCTGGTGAAGCAGGGCGACG | |
| | ACTACGTGTACCTGCCCTACCCCGACCCCAGCAGGATCCTGGGCGCC | |
| | GGCTGCTTCGTGGACGACATCGTGAAGACCGACGGCACCCTGATGATC | |
| | GAGAGGTTCGTGAGCCTGGCCATCGACGCCTACCCCCTGACCAAGCAC | |
| | CCCAACCAGGAGTACGCCGACGTGTTCCACCTGTACCTGCAGTACATC | |
| | AGGAAGCTGCACGACGAGCTGACCGGCCACATGCTGGACATGTACAG | |
| | CGTGATGCTGACCAACGACAACACCAGCAGGTACTGGGAGCCCGAGTT | |
| | CTACGAGGCCATGTACACCCCCCACACCGTGCTGCAGTGATGA | |
| 59 | ATGTTCGTGTTCCTGGTGCTGCTGCCCCTGGTGAGCAGCCAGTGCGTG | 344 |
| Pan-CoV | AACCTGACCACCAGGACCCAGCTGCCCCCCGCCTACACCAACAGCTTC | |
| (B6.1) | ACCAGGGGCGTGTACTACCCCGACAAGGTGTTCAGGAGCAGCGTGCT | |
| | GCACAGCACCCAGGACCTGTTCCTGCCCTTCTTCAGCAACGTGACCTG | |
| | GTTCCACGCCATCCACGTGAGCGGCACCAACGGCACCAAGAGGTTCGA | |
| | CAACCCCGTGCTGCCCTTCAACGACGGCGTGTACTTCGCCAGCACCGA | |
| | GAAGAGCAACATCATCAGGGGCTGGATCTTCGGCACCACCCTGGACAG | |
| | CAAGACCCAGAGCCTGCTGATCGTGAACAACGCCACCAACGTGGTGAT | |
| | CAAGGTGTGCGAGTTCCAGTTCTGCAACGACCCCTTCCTGGGCGTGTA | |
| | CTACCACAAGAACAACAAGAGCTGGATGGAGAGCGAGTTCAGGGTGTA | |
| | CAGCAGCGCCAACAACTGCACCTTCGAGTACGTGAGCCAGCCCTTCCT | |
| | GATGGACCTGGAGGGCAAGCAGGGCAACTTCAAGAACCTGAGGGAGT | |
| | TCGTGTTCAAGAACATCGACGGCTACTTCAAGATCTACAGCAAGCACAC | |
| | CCCCATCAACCTGGTGAGGGACCTGCCCCAGGGCTTCAGCGCCCTGG | |
| | AGCCCCTGGTGGACCTGCCCATCGGCATCAACATCACCAGGTTCCAGA | |
| | CCCTGCTGGCCCTGCACAGGAGCTACCTGACCCCCGGCGACAGCAGC | |
| | AGCGGCTGGACCGCCGGCGCCGCCGCCTACTACGTGGGCTACCTGCA | |
| | GCCCAGGACCTTCCTGCTGAAGTACAACGAGAACGGCACCATCACCGA | |
| | CGCCGTGGACTGCGCCCTGGACCCCCTGAGCGAGACCAAGTGCACCC | |
| | TGAAGAGCTTCACCGTGGAGAAGGGCATCTACCAGACCAGCAACTTCA | |
| | GGGTGCAGCCCACCGAGAGCATCGTGAGGTTCCCCAACATCACCAACC | |
| | TGTGCCCCTTCGGCGAGGTGTTCAACGCCACCAGGTTCGCCAGCGTGT | |
| | ACGCCTGGAACAGGAAGAGGATCAGCAACTGCGTGGCCGACTACAGC | |
| | GTGCTGTACAACAGCGCCAGCTTCAGCACCTTCAAGTGCTACGGCGTG | |
| | AGCCCCACCAAGCTGAACGACCTGTGCTTCACCAACGTGTACGCCGAC | |
| | AGCTTCGTGATCAGGGGCGACGAGGTGAGGCAGATCGCCCCCGGCCA | |
| | GACCGGCAAGATCGCCGACTACAACTACAAGCTGCCCGACGACTTCAC | |
| | CGGCTGCGTGATCGCCTGGAACAGCAACAACCTGGACAGCAAGGTGG | |
| | GCGGCAACTACAACTACCTGTACAGGCTGTTCAGGAAGAGCAACCTGA | |
| | AGCCCTTCGAGAGGGACATCAGCACCGAGATCTACCAGGCCGGCAGC | |
| | ACCCCCTGCAACGGCGTGGAGGGCTTCAACTGCTACTTCCCCCTGCAG | |
| | AGCTACGGCTTCCAGCCCACCAACGGCGTGGGCTACCAGCCCTACAG | |
| | GGTGGTGGTGCTGAGCTTCGAGCTGCTGCACGCCCCCGCCACCGTGT | |
| | GCGGCCCCAAGAAGAGCACCAACCTGGTGAAGAACAAGTGCGTGAACT | |
| | TCAACTTCAACGGCCTGACCGGCACCGGCGTGCTGACCGAGAGCAACA | |
| | AGAAGTTCCTGCCCTTCCAGCAGTTCGGCAGGGACATCGCCGACACCA | |
| | CCGACGCCGTGAGGGACCCCCAGACCCTGGAGATCCTGGACATCACC | |
| | CCCTGCAGCTTCGGCGGCGTGAGCGTGATCACCCCCGGCACCAACAC | |
| | CAGCAACCAGGTGGCCGTGCTGTACCAGGACGTGAACTGCACCGAGG | |
| | TGCCCGTGGCCATCCACGCCGACCAGCTGACCCCCACCTGGAGGGTG | |
| | TACAGCACCGGCAGCAACGTGTTCCAGACCAGGGCCGGCTGCCTGAT | |
| | CGGCGCCGAGCACGTGAACAACAGCTACGAGTGCGACATCCCCATCG | |
| | GCGCCGGCATCTGCGCCAGCTACCAGACCCAGACCAACAGCCCCGGC | |
| | AGCGCCAGCAGCGTGGCCAGCCAGAGCATCATCGCCTACACCATGAG | |
| | CCTGGGCGCCGAGAACAGCGTGGCCTACAGCAACAACAGCATCGCCA | |
| | TCCCCACCAACTTCACCATCAGCGTGACCACCGAGATCCTGCCCGTGA | |
| | GCATGACCAAGACCAGCGTGGACTGCACCATGTACATCTGCGGCGACA | |
| | GCACCGAGTGCAGCAACCTGCTGCTGCAGTACGGCAGCTTCTGCACCC | |
| | AGCTGAACAGGGCCCTGACCGGCATCGCCGTGGAGCAGGACAAGAAC | |
| | ACCCAGGAGGTGTTCGCCCAGGTGAAGCAGATCTACAAGACCCCCCCC | |
| | ATCAAGGACTTCGGCGGCTTCAACTTCAGCCAGATCCTGCCCGACCCC | |
| | AGCAAGCCCAGCAAGAGGAGCCCCATCGAGGACCTGCTGTTCAACAAG | |
| | GTGACCCTGGCCGACGCCGGCTTCATCAAGCAGTACGGCGACTGCCT | |
| | GGGCGACATCGCCGCCAGGGACCTGATCTGCGCCCAGAAGTTCAACG | |
| | GCCTGACCGTGCTGCCCCCCCTGCTGACCGACGAGATGATCGCCCAG | |
| | TACACCAGCGCCCTGCTGGCCGGCACCATCACCAGCGGCTGGACCTT | |
| | CGGCGCCGGCCCCGCCCTGCAGATCCCCTTCCCCATGCAGATGGCCT | |
| | ACAGGTTCAACGGCATCGGCGTGACCCAGAACGTGCTGTACGAGAACC | |
| | AGAAGCTGATCGCCAACCAGTTCAACAGCGCCATCGGCAAGATCCAGG | |
| | ACAGCCTGAGCAGCACCCCCAGCGCCCTGGGCAAGCTGCAGGACGTG | |
| | GTGAACCAGAACGCCCAGGCCCTGAACACCCTGGTGAAGCAGCTGAG | |
| | CAGCAACTTCGGCGCCATCAGCAGCGTGCTGAACGACATCCTGAGCAG | |
| | GCTGGACCCCCCCGAGGCCGAGGTGCAGATCGACAGGCTGATCACCG | |
| | GCAGGCTGCAGAGCCTGCAGACCTACGTGACCCAGCAGCTGATCAGG | |
| | GCCGCCGAGATCAGGGCCAGCGCCAACCTGGCCGCCACCAAGATGAG | |
| | CGAGTGCGTGCTGGGCCAGAGCAAGAGGGTGGACTTCTGCGGCAAGG | |
| | GCTACCACCTGATGAGCTTCCCCCAGAGCGCCCCCCACGGCGTGGTG | |
| | TTCCTGCACGTGACCTACGTGCCCGCCCAGGAGAAGAACTTCACCACC | |
| | GCCCCCGCCATCTGCCACGACGGCAAGGCCCACTTCCCCAGGGAGGG | |
| | CGTGTTCGTGAGCAACGGCACCCACTGGTTCGTGACCCAGAGGAACTT | |
| | CTACGAGCCCCAGATCATCACCACCGACAACACCTTCGTGAGCGGCAA | |
| | CTGCGACGTGGTGATCGGCATCGTGAACAACACCGTGTACGACCCCCT | |
| | GCAGCCCGAGCTGGACAGCTTCAAGGAGGAGCTGGACAAGTACTTCAA | |
| | GAACCACACCAGCCCCGACGTGGACCTGGGCGACATCAGCGGCATCA | |
| | ACGCCAGCGTGGTGAACATCCAGAAGGAGATCGACAGGCTGAACGAG | |
| | GTGGCCAAGAACCTGAACGAGAGCCTGATCGACCTGCAGGAGCTGGG | |
| | CAAGTACGAGCAGTACATCAAGTGGCCCTGGTACATCTGGCTGGGCTT | |
| | CATCGCCGGCCTGATCGCCATCGTGATGGTGACCATCATGCTGTGCTG | |
| | CATGACCAGCTGCTGCAGCTGCCTGAAGGGCTGCTGCAGCTGCGGCA | |
| | GCTGCTGCAAGTTCGACGAGGACGACAGCGAGCCCGTGCTGAAGGGC | |
| | GTGAAGCTGCACTACACCGGAAGCGGAGCCACGAACTTCTCTCTGTTA | |
| | AAGCAAGCAGGAGATGTTGAAGAAAACCCCGGGCCTGCCCCCACCAAG | |
| | GTGACCTTCGGCGACGACACCGTGATCGAGGTGCAGGGCTACAAGAG | |
| | CGTGAACATCACCTTCGAGCTGGACGAGAGGATCGACAAGGTGCTGAA | |
| | CGAGAAGTGCAGCGCCTACACCGTGGAGCTGGGCACCGAGGTGAACG | |
| | AGTTCGCCTGCGTGGTGGCCGACGCCGTGATCAAGACCCTGCAGCCC | |
| | GTGAGCGAGCTGCTGACCCCCCTGGGCATCGACCTGGACGAGTGGAG | |
| | CATGGCCACCTACTACCTGTTCGACGAGAGCGGCGAGTTCAAGCTGGC | |
| | CAGCCACATGTACTGCAGCTTCTACCCCCCCGACGAGGACGAGGAGGA | |
| | GGGCGACTGCGAGGAGGAGGAGTTCGAGCCCAGCACCCAGTACGAGT | |
| | ACGGCACCGAGGACGACTACCAGGGCAAGCCCCTGGAGTTCGGCGCC | |
| | ACCAGCGCCGCCCTGCAGCCCGAGGAGGAGCAGGAGGAGGACTGGC | |
| | TGGACGACGACAGCCAGCAGACCGTGGGCCAGCAGGACGGCAGCGA | |
| | GGACAACCAGACCACCACCATCCAGACCATCGTGGAGGTGCAGCCCCA | |
| | GCTGGAGATGGAGCTGACCCCCGTGGTGCAGACCATCGAGGTGAACA | |
| | GCTTCAGCGGCTACCTGAAGCTGACCGACAACGTGTACATCAAGAACG | |
| | CCGACATCGTGGAGGAGGCCAAGAAGGTGAAGCCCACCGTGGTGGTG | |
| | AACGCCGCCAACGTGTACCTGAAGCACGGCGGCGGCGTGGCCGGCGC | |
| | CCTGAACAAGGCCACCAACAACGCCATGCAGGTGGAGAGCGACGACTA | |
| | CATCGCCACCAACGGCCCCCTGAAGGTGGGCGGCAGCTGCGTGCTGA | |
| | GCGGCCACAACCTGGCCAAGCACTGCCTGCACGTGGTGGGCCCCAAC | |
| | GTGAACAAGGGCGAGGACATCCAGCTGCTGAAGAGCGCCTACGAGAA | |
| | CTTCAACCAGCACGAGGTGCTGCTGGCCCCCCTGCTGAGCGCCGGCA | |
| | TCTTCGGCGCCGACCCCATCCACAGCCTGAGGGTGTGCGTGGACACC | |
| | GTGAGGACCAACGTGTACCTGGCCGTGTTCGACAAGAACCTGTACGAC | |
| | AAGCTGGTGAGCAGCTTCCTGGAGATGAAGAGCGAGAAGCAGGTGGA | |
| | GCAGAAGATCGCCGAGATCCCCAAGGAGGAGGTGAAGCCCTTCATCAC | |
| | CGAGAGCAAGCCCAGCGTGGAGCAGAGGAAGCAGGACGACAAGAAGA | |
| | TCAAGGCCTGCGTGGAGGAGGTGACCACCACCCTGGAGGAGACCAAG | |
| | TTCCTGACCGAGAACCTGCTGCTGTACATCGACATCAACGGCAACCTG | |
| | CACCCCGACAGCGCCACCCTGGTGAGCGACATCGACATCACCTTCCTG | |
| | AAGAAGGACGCCCCCTACATCGTGGGCGACGTGGTGCAGGAGGGCGT | |
| | GCTGACCGCCGTGGTGATCCCCACCAAGAAGGCCGGCGGCACCACCG | |
| | AGATGCTGGCCAAGGCCCTGAGGAAGGTGCCCACCGACAACTACATCA | |
| | CCACCTACCCCGGCCAGGGCCTGAACGGCTACACCGTGGAGGAGGCC | |
| | AAGACCGTGCTGAAGAAGTGCAAGAGCGCCTTCTACATCCTGCCCAGC | |
| | ATCATCAGCAACGAGAAGCAGGAGATCCTGGGCACCGTGAGCTGGAAC | |
| | CTGAGGGAGATGCTGGCCCACGCCGAGGAGACCAGGAAGCTGATGCC | |
| | CGTGTGCGTGGAGACCAAGGCCATCGTGAGCACCATCCAGAGGAAGTA | |
| | CAAGGGCATCAAGATCCAGGAGGGCGTGGTGGACTACGGCGCCAGGT | |
| | TCTACTTCTACACCAGCAAGACCACCGTGGCCAGCCTGATCAACACCCT | |
| | GAACGACCTGAACGAGACCCTGGTGACCATGCCCCTGGGCTACGTGAC | |
| | CCACGGCCTGAACCTGGAGGAGGCCGCCAGGTACATGAGGAGCCTGA | |
| | AGGTGCCCGCCACCGTGAGCGTGAGCAGCCCCGACGCCGTGACCGCC | |
| | TACAACGGCTACCTGACCAGCAGCAGCAAGACCCCCGAGGAGCACTTC | |
| | ATCGAGACCATCAGCCTGGCCGGCAGCTACAAGGACTGGAGCTACAGC | |
| | GGCCAGAGCACCCAGCTGGGCATCGAGTTCCTGAAGAGGGGCGACAA | |
| | GAGCGTGTACTACACCAGCAACCCCACCACCTTCCACCTGGACGGCGA | |
| | GGTGATCACCTTCGACAACCTGAAGACCCTGCTGAGCCTGAGGGAGGT | |
| | GAGGACCATCAAGGTGTTCACCACCGTGGACAACATCAACCTGCACTG | |
| | ATGA | |
| 60 | ATGTTCGTGTTCCTGGTGCTGCTGCCCCTGGTGAGCAGCCAGTGCGTG | 345 |
| Pan-CoV | AACCTGACCACCAGGACCCAGCTGCCCCCCGCCTACACCAACAGCTTC | |
| (B6.2) | ACCAGGGGCGTGTACTACCCCGACAAGGTGTTCAGGAGCAGCGTGCT | |
| | GCACAGCACCCAGGACCTGTTCCTGCCCTTCTTCAGCAACGTGACCTG | |
| | GTTCCACGCCATCCACGTGAGCGGCACCAACGGCACCAAGAGGTTCGA | |
| | CAACCCCGTGCTGCCCTTCAACGACGGCGTGTACTTCGCCAGCACCGA | |
| | GAAGAGCAACATCATCAGGGGCTGGATCTTCGGCACCACCCTGGACAG | |
| | CAAGACCCAGAGCCTGCTGATCGTGAACAACGCCACCAACGTGGTGAT | |
| | CAAGGTGTGCGAGTTCCAGTTCTGCAACGACCCCTTCCTGGGCGTGTA | |
| | CTACCACAAGAACAACAAGAGCTGGATGGAGAGCGAGTTCAGGGTGTA | |
| | CAGCAGCGCCAACAACTGCACCTTCGAGTACGTGAGCCAGCCCTTCCT | |
| | GATGGACCTGGAGGGCAAGCAGGGCAACTTCAAGAACCTGAGGGAGT | |
| | TCGTGTTCAAGAACATCGACGGCTACTTCAAGATCTACAGCAAGCACAC | |
| | CCCCATCAACCTGGTGAGGGACCTGCCCCAGGGCTTCAGCGCCCTGG | |
| | AGCCCCTGGTGGACCTGCCCATCGGCATCAACATCACCAGGTTCCAGA | |
| | CCCTGCTGGCCCTGCACAGGAGCTACCTGACCCCCGGCGACAGCAGC | |
| | AGCGGCTGGACCGCCGGCGCCGCCGCCTACTACGTGGGCTACCTGCA | |
| | GCCCAGGACCTTCCTGCTGAAGTACAACGAGAACGGCACCATCACCGA | |
| | CGCCGTGGACTGCGCCCTGGACCCCCTGAGCGAGACCAAGTGCACCC | |
| | TGAAGAGCTTCACCGTGGAGAAGGGCATCTACCAGACCAGCAACTTCA | |
| | GGGTGCAGCCCACCGAGAGCATCGTGAGGTTCCCCAACATCACCAACC | |
| | TGTGCCCCTTCGGCGAGGTGTTCAACGCCACCAGGTTCGCCAGCGTGT | |
| | ACGCCTGGAACAGGAAGAGGATCAGCAACTGCGTGGCCGACTACAGC | |
| | GTGCTGTACAACAGCGCCAGCTTCAGCACCTTCAAGTGCTACGGCGTG | |
| | AGCCCCACCAAGCTGAACGACCTGTGCTTCACCAACGTGTACGCCGAC | |
| | AGCTTCGTGATCAGGGGCGACGAGGTGAGGCAGATCGCCCCCGGCCA | |
| | GACCGGCAAGATCGCCGACTACAACTACAAGCTGCCCGACGACTTCAC | |
| | CGGCTGCGTGATCGCCTGGAACAGCAACAACCTGGACAGCAAGGTGG | |
| | GCGGCAACTACAACTACCTGTACAGGCTGTTCAGGAAGAGCAACCTGA | |
| | AGCCCTTCGAGAGGGACATCAGCACCGAGATCTACCAGGCCGGCAGC | |
| | ACCCCCTGCAACGGCGTGGAGGGCTTCAACTGCTACTTCCCCCTGCAG | |
| | AGCTACGGCTTCCAGCCCACCAACGGCGTGGGCTACCAGCCCTACAG | |
| | GGTGGTGGTGCTGAGCTTCGAGCTGCTGCACGCCCCCGCCACCGTGT | |
| | GCGGCCCCAAGAAGAGCACCAACCTGGTGAAGAACAAGTGCGTGAACT | |
| | TCAACTTCAACGGCCTGACCGGCACCGGCGTGCTGACCGAGAGCAACA | |
| | AGAAGTTCCTGCCCTTCCAGCAGTTCGGCAGGGACATCGCCGACACCA | |
| | CCGACGCCGTGAGGGACCCCCAGACCCTGGAGATCCTGGACATCACC | |
| | CCCTGCAGCTTCGGCGGCGTGAGCGTGATCACCCCCGGCACCAACAC | |
| | CAGCAACCAGGTGGCCGTGCTGTACCAGGACGTGAACTGCACCGAGG | |
| | TGCCCGTGGCCATCCACGCCGACCAGCTGACCCCCACCTGGAGGGTG | |
| | TACAGCACCGGCAGCAACGTGTTCCAGACCAGGGCCGGCTGCCTGAT | |
| | CGGCGCCGAGCACGTGAACAACAGCTACGAGTGCGACATCCCCATCG | |
| | GCGCCGGCATCTGCGCCAGCTACCAGACCCAGACCAACAGCCCCGGC | |
| | AGCGCCAGCAGCGTGGCCAGCCAGAGCATCATCGCCTACACCATGAG | |
| | CCTGGGCGCCGAGAACAGCGTGGCCTACAGCAACAACAGCATCGCCA | |
| | TCCCCACCAACTTCACCATCAGCGTGACCACCGAGATCCTGCCCGTGA | |
| | GCATGACCAAGACCAGCGTGGACTGCACCATGTACATCTGCGGCGACA | |
| | GCACCGAGTGCAGCAACCTGCTGCTGCAGTACGGCAGCTTCTGCACCC | |
| | AGCTGAACAGGGCCCTGACCGGCATCGCCGTGGAGCAGGACAAGAAC | |
| | ACCCAGGAGGTGTTCGCCCAGGTGAAGCAGATCTACAAGACCCCCCCC | |
| | ATCAAGGACTTCGGCGGCTTCAACTTCAGCCAGATCCTGCCCGACCCC | |
| | AGCAAGCCCAGCAAGAGGAGCCCCATCGAGGACCTGCTGTTCAACAAG | |
| | GTGACCCTGGCCGACGCCGGCTTCATCAAGCAGTACGGCGACTGCCT | |
| | GGGCGACATCGCCGCCAGGGACCTGATCTGCGCCCAGAAGTTCAACG | |
| | GCCTGACCGTGCTGCCCCCCCTGCTGACCGACGAGATGATCGCCCAG | |
| | TACACCAGCGCCCTGCTGGCCGGCACCATCACCAGCGGCTGGACCTT | |
| | CGGCGCCGGCCCCGCCCTGCAGATCCCCTTCCCCATGCAGATGGCCT | |
| | ACAGGTTCAACGGCATCGGCGTGACCCAGAACGTGCTGTACGAGAACC | |
| | AGAAGCTGATCGCCAACCAGTTCAACAGCGCCATCGGCAAGATCCAGG | |
| | ACAGCCTGAGCAGCACCCCCAGCGCCCTGGGCAAGCTGCAGGACGTG | |
| | GTGAACCAGAACGCCCAGGCCCTGAACACCCTGGTGAAGCAGCTGAG | |
| | CAGCAACTTCGGCGCCATCAGCAGCGTGCTGAACGACATCCTGAGCAG | |
| | GCTGGACCCCCCCGAGGCCGAGGTGCAGATCGACAGGCTGATCACCG | |
| | GCAGGCTGCAGAGCCTGCAGACCTACGTGACCCAGCAGCTGATCAGG | |
| | GCCGCCGAGATCAGGGCCAGCGCCAACCTGGCCGCCACCAAGATGAG | |
| | CGAGTGCGTGCTGGGCCAGAGCAAGAGGGTGGACTTCTGCGGCAAGG | |
| | GCTACCACCTGATGAGCTTCCCCCAGAGCGCCCCCCACGGCGTGGTG | |
| | TTCCTGCACGTGACCTACGTGCCCGCCCAGGAGAAGAACTTCACCACC | |
| | GCCCCCGCCATCTGCCACGACGGCAAGGCCCACTTCCCCAGGGAGGG | |
| | CGTGTTCGTGAGCAACGGCACCCACTGGTTCGTGACCCAGAGGAACTT | |
| | CTACGAGCCCCAGATCATCACCACCGACAACACCTTCGTGAGCGGCAA | |
| | CTGCGACGTGGTGATCGGCATCGTGAACAACACCGTGTACGACCCCCT | |
| | GCAGCCCGAGCTGGACAGCTTCAAGGAGGAGCTGGACAAGTACTTCAA | |
| | GAACCACACCAGCCCCGACGTGGACCTGGGCGACATCAGCGGCATCA | |
| | ACGCCAGCGTGGTGAACATCCAGAAGGAGATCGACAGGCTGAACGAG | |
| | GTGGCCAAGAACCTGAACGAGAGCCTGATCGACCTGCAGGAGCTGGG | |
| | CAAGTACGAGCAGTACATCAAGTGGCCCTGGTACATCTGGCTGGGCTT | |
| | CATCGCCGGCCTGATCGCCATCGTGATGGTGACCATCATGCTGTGCTG | |
| | CATGACCAGCTGCTGCAGCTGCCTGAAGGGCTGCTGCAGCTGCGGCA | |
| | GCTGCTGCAAGTTCGACGAGGACGACAGCGAGCCCGTGCTGAAGGGC | |
| | GTGAAGCTGCACTACACCGGAAGCGGAGCCACGAACTTCTCTCTGTTA | |
| | AAGCAAGCAGGAGATGTTGAAGAAAACCCCGGGCCTAGCGGCTTCAGG | |
| | AAGATGGCCTTCCCCAGCGGCAAGGTGGAGGGCTGCATGGTGCAGGT | |
| | GACCTGCGGCACCACCACCCTGAACGGCCTGTGGCTGGACGACGTGG | |
| | TGTACTGCCCCAGGCACGTGATCTGCACCAGCGAGGACATGCTGAACC | |
| | CCAACTACGAGGACCTGCTGATCAGGAAGAGCAACCACAACTTCCTGG | |
| | TGCAGGCCGGCAACGTGCAGCTGAGGGTGATCGGCCACAGCATGCAG | |
| | AACTGCGTGCTGAAGCTGAAGGTGGACACCGCCAACCCCAAGACCCCC | |
| | AAGTACAAGTTCGTGAGGATCCAGCCCGGCCAGACCTTCAGCGTGCTG | |
| | GCCTGCTACAACGGCAGCCCCAGCGGCGTGTACCAGTGCGCCATGAG | |
| | GCCCAACTTCACCATCAAGGGCAGCTTCCTGAACGGCAGCTGCGGCAG | |
| | CGTGGGCTTCAACATCGACTACGACTGCGTGAGCTTCTGCTACATGCA | |
| | CCACATGGAGCTGCCCACCGGCGTGCACGCCGGCACCGACCTGGAGG | |
| | GCAACTTCTACGGCCCCTTCGTGGACAGGCAGACCGCCCAGGCCGCC | |
| | GGCACCGACACCACCATCACCGTGAACGTGCTGGCCTGGCTGTACGC | |
| | CGCCGTGATCAACGGCGACAGGTGGTTCCTGAACAGGTTCACCACCAC | |
| | CCTGAACGACTTCAACCTGGTGGCCATGAAGTACAACTACGAGCCCCT | |
| | GACCCAGGACCACGTGGACATCCTGGGCCCCCTGAGCGCCCAGACCG | |
| | GCATCGCCGTGCTGGACATGTGCGCCAGCCTGAAGGAGCTGCTGCAG | |
| | AACGGCATGAACGGCAGGACCATCCTGGGCAGCGCCCTGCTGGAGGA | |
| | CGAGTTCACCCCCTTCGACGTGGTGAGGCAGTGCAGCGGCGTGACCTT | |
| | CCAGTGATGA | |
| 61 | ATGTTCGTGTTCCTGGTGCTGCTGCCCCTGGTGAGCAGCCAGTGCGTG | 346 |
| Pan-CoV | AACCTGACCACCAGGACCCAGCTGCCCCCCGCCTACACCAACAGCTTC | |
| (B6.3) | ACCAGGGGCGTGTACTACCCCGACAAGGTGTTCAGGAGCAGCGTGCT | |
| | GCACAGCACCCAGGACCTGTTCCTGCCCTTCTTCAGCAACGTGACCTG | |
| | GTTCCACGCCATCCACGTGAGCGGCACCAACGGCACCAAGAGGTTCGA | |
| | CAACCCCGTGCTGCCCTTCAACGACGGCGTGTACTTCGCCAGCACCGA | |
| | GAAGAGCAACATCATCAGGGGCTGGATCTTCGGCACCACCCTGGACAG | |
| | CAAGACCCAGAGCCTGCTGATCGTGAACAACGCCACCAACGTGGTGAT | |
| | CAAGGTGTGCGAGTTCCAGTTCTGCAACGACCCCTTCCTGGGCGTGTA | |
| | CTACCACAAGAACAACAAGAGCTGGATGGAGAGCGAGTTCAGGGTGTA | |
| | CAGCAGCGCCAACAACTGCACCTTCGAGTACGTGAGCCAGCCCTTCCT | |
| | GATGGACCTGGAGGGCAAGCAGGGCAACTTCAAGAACCTGAGGGAGT | |
| | TCGTGTTCAAGAACATCGACGGCTACTTCAAGATCTACAGCAAGCACAC | |
| | CCCCATCAACCTGGTGAGGGACCTGCCCCAGGGCTTCAGCGCCCTGG | |
| | AGCCCCTGGTGGACCTGCCCATCGGCATCAACATCACCAGGTTCCAGA | |
| | CCCTGCTGGCCCTGCACAGGAGCTACCTGACCCCCGGCGACAGCAGC | |
| | AGCGGCTGGACCGCCGGCGCCGCCGCCTACTACGTGGGCTACCTGCA | |
| | GCCCAGGACCTTCCTGCTGAAGTACAACGAGAACGGCACCATCACCGA | |
| | CGCCGTGGACTGCGCCCTGGACCCCCTGAGCGAGACCAAGTGCACCC | |
| | TGAAGAGCTTCACCGTGGAGAAGGGCATCTACCAGACCAGCAACTTCA | |
| | GGGTGCAGCCCACCGAGAGCATCGTGAGGTTCCCCAACATCACCAACC | |
| | TGTGCCCCTTCGGCGAGGTGTTCAACGCCACCAGGTTCGCCAGCGTGT | |
| | ACGCCTGGAACAGGAAGAGGATCAGCAACTGCGTGGCCGACTACAGC | |
| | GTGCTGTACAACAGCGCCAGCTTCAGCACCTTCAAGTGCTACGGCGTG | |
| | AGCCCCACCAAGCTGAACGACCTGTGCTTCACCAACGTGTACGCCGAC | |
| | AGCTTCGTGATCAGGGGCGACGAGGTGAGGCAGATCGCCCCCGGCCA | |
| | GACCGGCAAGATCGCCGACTACAACTACAAGCTGCCCGACGACTTCAC | |
| | CGGCTGCGTGATCGCCTGGAACAGCAACAACCTGGACAGCAAGGTGG | |
| | GCGGCAACTACAACTACCTGTACAGGCTGTTCAGGAAGAGCAACCTGA | |
| | AGCCCTTCGAGAGGGACATCAGCACCGAGATCTACCAGGCCGGCAGC | |
| | ACCCCCTGCAACGGCGTGGAGGGCTTCAACTGCTACTTCCCCCTGCAG | |
| | AGCTACGGCTTCCAGCCCACCAACGGCGTGGGCTACCAGCCCTACAG | |
| | GGTGGTGGTGCTGAGCTTCGAGCTGCTGCACGCCCCCGCCACCGTGT | |
| | GCGGCCCCAAGAAGAGCACCAACCTGGTGAAGAACAAGTGCGTGAACT | |
| | TCAACTTCAACGGCCTGACCGGCACCGGCGTGCTGACCGAGAGCAACA | |
| | AGAAGTTCCTGCCCTTCCAGCAGTTCGGCAGGGACATCGCCGACACCA | |
| | CCGACGCCGTGAGGGACCCCCAGACCCTGGAGATCCTGGACATCACC | |
| | CCCTGCAGCTTCGGCGGCGTGAGCGTGATCACCCCCGGCACCAACAC | |
| | CAGCAACCAGGTGGCCGTGCTGTACCAGGACGTGAACTGCACCGAGG | |
| | TGCCCGTGGCCATCCACGCCGACCAGCTGACCCCCACCTGGAGGGTG | |
| | TACAGCACCGGCAGCAACGTGTTCCAGACCAGGGCCGGCTGCCTGAT | |
| | CGGCGCCGAGCACGTGAACAACAGCTACGAGTGCGACATCCCCATCG | |
| | GCGCCGGCATCTGCGCCAGCTACCAGACCCAGACCAACAGCCCCGGC | |
| | AGCGCCAGCAGCGTGGCCAGCCAGAGCATCATCGCCTACACCATGAG | |
| | CCTGGGCGCCGAGAACAGCGTGGCCTACAGCAACAACAGCATCGCCA | |
| | TCCCCACCAACTTCACCATCAGCGTGACCACCGAGATCCTGCCCGTGA | |
| | GCATGACCAAGACCAGCGTGGACTGCACCATGTACATCTGCGGCGACA | |
| | GCACCGAGTGCAGCAACCTGCTGCTGCAGTACGGCAGCTTCTGCACCC | |
| | AGCTGAACAGGGCCCTGACCGGCATCGCCGTGGAGCAGGACAAGAAC | |
| | ACCCAGGAGGTGTTCGCCCAGGTGAAGCAGATCTACAAGACCCCCCCC | |
| | ATCAAGGACTTCGGCGGCTTCAACTTCAGCCAGATCCTGCCCGACCCC | |
| | AGCAAGCCCAGCAAGAGGAGCCCCATCGAGGACCTGCTGTTCAACAAG | |
| | GTGACCCTGGCCGACGCCGGCTTCATCAAGCAGTACGGCGACTGCCT | |
| | GGGCGACATCGCCGCCAGGGACCTGATCTGCGCCCAGAAGTTCAACG | |
| | GCCTGACCGTGCTGCCCCCCCTGCTGACCGACGAGATGATCGCCCAG | |
| | TACACCAGCGCCCTGCTGGCCGGCACCATCACCAGCGGCTGGACCTT | |
| | CGGCGCCGGCCCCGCCCTGCAGATCCCCTTCCCCATGCAGATGGCCT | |
| | ACAGGTTCAACGGCATCGGCGTGACCCAGAACGTGCTGTACGAGAACC | |
| | AGAAGCTGATCGCCAACCAGTTCAACAGCGCCATCGGCAAGATCCAGG | |
| | ACAGCCTGAGCAGCACCCCCAGCGCCCTGGGCAAGCTGCAGGACGTG | |
| | GTGAACCAGAACGCCCAGGCCCTGAACACCCTGGTGAAGCAGCTGAG | |
| | CAGCAACTTCGGCGCCATCAGCAGCGTGCTGAACGACATCCTGAGCAG | |
| | GCTGGACCCCCCCGAGGCCGAGGTGCAGATCGACAGGCTGATCACCG | |
| | GCAGGCTGCAGAGCCTGCAGACCTACGTGACCCAGCAGCTGATCAGG | |
| | GCCGCCGAGATCAGGGCCAGCGCCAACCTGGCCGCCACCAAGATGAG | |
| | CGAGTGCGTGCTGGGCCAGAGCAAGAGGGTGGACTTCTGCGGCAAGG | |
| | GCTACCACCTGATGAGCTTCCCCCAGAGCGCCCCCCACGGCGTGGTG | |
| | TTCCTGCACGTGACCTACGTGCCCGCCCAGGAGAAGAACTTCACCACC | |
| | GCCCCCGCCATCTGCCACGACGGCAAGGCCCACTTCCCCAGGGAGGG | |
| | CGTGTTCGTGAGCAACGGCACCCACTGGTTCGTGACCCAGAGGAACTT | |
| | CTACGAGCCCCAGATCATCACCACCGACAACACCTTCGTGAGCGGCAA | |
| | CTGCGACGTGGTGATCGGCATCGTGAACAACACCGTGTACGACCCCCT | |
| | GCAGCCCGAGCTGGACAGCTTCAAGGAGGAGCTGGACAAGTACTTCAA | |
| | GAACCACACCAGCCCCGACGTGGACCTGGGCGACATCAGCGGCATCA | |
| | ACGCCAGCGTGGTGAACATCCAGAAGGAGATCGACAGGCTGAACGAG | |
| | GTGGCCAAGAACCTGAACGAGAGCCTGATCGACCTGCAGGAGCTGGG | |
| | CAAGTACGAGCAGTACATCAAGTGGCCCTGGTACATCTGGCTGGGCTT | |
| | CATCGCCGGCCTGATCGCCATCGTGATGGTGACCATCATGCTGTGCTG | |
| | CATGACCAGCTGCTGCAGCTGCCTGAAGGGCTGCTGCAGCTGCGGCA | |
| | GCTGCTGCAAGTTCGACGAGGACGACAGCGAGCCCGTGCTGAAGGGC | |
| | GTGAAGCTGCACTACACCGGAAGCGGAGCCACGAACTTCTCTCTGTTA | |
| | AAGCAAGCAGGAGATGTTGAAGAAAACCCCGGGCCTAGCGCCGACGC | |
| | CCAGAGCTTCCTGAACAGGGTGTGCGGCGTGAGCGCCGCCAGGCTGA | |
| | CCCCCTGCGGCACCGGCACCAGCACCGACGTGGTGTACAGGGCCTTC | |
| | GACATCTACAACGACAAGGTGGCCGGCTTCGCCAAGTTCCTGAAGACC | |
| | AACTGCTGCAGGTTCCAGGAGAAGGACGAGGACGACAACCTGATCGAC | |
| | AGCTACTTCGTGGTGAAGAGGCACACCTTCAGCAACTACCAGCACGAG | |
| | GAGACCATCTACAACCTGCTGAAGGACTGCCCCGCCGTGGCCAAGCAC | |
| | GACTTCTTCAAGTTCAGGATCGACGGCGACATGGTGCCCCACATCAGC | |
| | AGGCAGAGGCTGACCAAGTACACCATGGCCGACCTGGTGTACGCCCT | |
| | GAGGCACTTCGACGAGGGCAACTGCGACACCCTGAAGGAGATCCTGG | |
| | TGACCTACAACTGCTGCGACGACGACTACTTCAACAAGAAGGACTGGT | |
| | ACGACTTCGTGGAGAACCCCGACATCCTGAGGGTGTACGCCAACCTGG | |
| | GCGAGAGGGTGAGGCAGGCCCTGCTGAAGACCGTGCAGTTCTGCGAC | |
| | GCCATGAGGAACGCCGGCATCGTGGGCGTGCTGACCCTGGACAACCA | |
| | GGACCTGAACGGCAACTGGTACGACTTCGGCGACTTCATCCAGACCAC | |
| | CCCCGGCAGCGGCGTGCCCGTGGTGGACAGCTACTACAGCCTGCTGA | |
| | TGCCCATCCTGACCCTGACCAGGGCCCTGACCGCCGAGAGCCACGTG | |
| | GACACCGACCTGACCAAGCCCTACATCAAGTGGGACCTGCTGAAGTAC | |
| | GACTTCACCGAGGAGAGGCTGAAGCTGTTCGACAGGTACTTCAAGTAC | |
| | TGGGACCAGACCTACCACCCCAACTGCGTGAACTGCCTGGACGACAGG | |
| | TGCATCCTGCACTGCGCCAACTTCAACGTGCTGTTCAGCACCGTGTTCC | |
| | CCCCCACCAGCTTCGGCCCCCTGGTGAGGAAGATCTTCGTGGACGGC | |
| | GTGCCCTTCGTGGTGAGCACCGGCTACCACTTCAGGGAGCTGGGCGT | |
| | GGTGCACAACCAGGACGTGAACCTGCACAGCAGCAGGCTGAGCTTCAA | |
| | GGAGCTGCTGGTGTACGCCGCCGACCCCGCCATGCACGCCGCCAGCG | |
| | GCAACCTGCTGCTGGACAAGAGGACCACCTGCTTCAGCGTGGCCGCC | |
| | CTGACCAACAACGTGGCCTTCCAGACCGTGAAGCCCGGCAACTTCAAC | |
| | AAGGACTTCTACGACTTCGCCGTGAGCAAGGGCTTCTTCAAGGAGGGC | |
| | AGCAGCGTGGAGCTGAAGCACTTCTTCTTCGCCCAGGACGGCAACGCC | |
| | GCCATCAGCGACTACGACTACTACAGGTACAACCTGCCCACCATGTGC | |
| | GACATCAGGCAGCTGCTGTTCGTGGTGGAGGTGGTGGACAAGTACTTC | |
| | GACTGCTACGACGGCGGCTGCATCAACGCCAACCAGGTGATCGTGAAC | |
| | AACCTGGACAAGAGCGCCGGCTTCCCCTTCAACAAGTGGGGCAAGGC | |
| | CAGGCTGTACTACGACAGCATGAGCTACGAGGACCAGGACGCCCTGTT | |
| | CGCCTACACCAAGAGGAACGTGATCCCCACCATCACCCAGATGAACCT | |
| | GAAGTACGCCATCAGCGCCAAGAACAGGGCCAGGACCGTGGCCGGCG | |
| | TGAGCATCTGCAGCACCATGACCAACAGGCAGTTCCACCAGAAGCTGC | |
| | TGAAGAGCATCGCCGCCACCAGGGGCGCCACCGTGGTGATCGGCACC | |
| | AGCAAGTTCTACGGCGGCTGGCACAACATGCTGAAGACCGTGTACAGC | |
| | GACGTGGAGAACCCCCACCTGATGGGCTGGGACTACCCCAAGTGCGA | |
| | CAGGGCCATGCCCAACATGCTGAGGATCATGGCCAGCCTGGTGCTGG | |
| | CCAGGAAGCACACCACCTGCTGCAGCCTGAGCCACAGGTTCTACAGGC | |
| | TGGCCAACGAGTGCGCCCAGGTGCTGAGCGAGATGGTGATGTGCGGC | |
| | GGCAGCCTGTACGTGAAGCCCGGCGGCACCAGCAGCGGCGACGCCAC | |
| | CACCGCCTACGCCAACAGCGTGTTCAACATCTGCCAGGCCGTGACCGC | |
| | CAACGTGAACGCCCTGCTGAGCACCGACGGCAACAAGATCGCCGACAA | |
| | GTACGTGAGGAACCTGCAGCACAGGCTGTACGAGTGCCTGTACAGGAA | |
| | CAGGGACGTGGACACCGACTTCGTGAACGAGTTCTACGCCTACCTGAG | |
| | GAAGCACTTCAGCATGATGATCCTGAGCGACGACGCCGTGGTGTGCTT | |
| | CAACAGCACCTACGCCAGCCAGGGCCTGGTGGCCAGCATCAAGAACTT | |
| | CAAGAGCGTGCTGTACTACCAGAACAACGTGTTCATGAGCGAGGCCAA | |
| | GTGCTGGACCGAGACCGACCTGACCAAGGGCCCCCACGAGTTCTGCA | |
| | GCCAGCACACCATGCTGGTGAAGCAGGGCGACGACTACGTGTACCTG | |
| | CCCTACCCCGACCCCAGCAGGATCCTGGGCGCCGGCTGCTTCGTGGA | |
| | CGACATCGTGAAGACCGACGGCACCCTGATGATCGAGAGGTTCGTGAG | |
| | CCTGGCCATCGACGCCTACCCCCTGACCAAGCACCCCAACCAGGAGTA | |
| | CGCCGACGTGTTCCACCTGTACCTGCAGTACATCAGGAAGCTGCACGA | |
| | CGAGCTGACCGGCCACATGCTGGACATGTACAGCGTGATGCTGACCAA | |
| | CGACAACACCAGCAGGTACTGGGAGCCCGAGTTCTACGAGGCCATGTA | |
| | CACCCCCCACACCGTGCTGCAGTGATGA | |
| 62 | ATGAGCGACAACGGCCCCCAGAACCAGAGGAACGCCCCCAGGATCAC | 347 |
| Pan-CoV (B3) | CTTCGGCGGCCCCAGCGACAGCACCGGCAGCAACCAGAACGGCGAGA | |
| | GGAGCGGCGCCAGGAGCAAGCAGAGGAGGCCCCAGGGCCTGCCCAA | |
| | CAACACCGCCAGCTGGTTCACCGCCCTGACCCAGCACGGCAAGGAGG | |
| | ACCTGAAGTTCCCCAGGGGCCAGGGCGTGCCCATCAACACCAACAGCA | |
| | GCCCCGACGACCAGATCGGCTACTACAGGAGGGCCACCAGGAGGATC | |
| | AGGGGCGGCGACGGCAAGATGAAGGACCTGAGCCCCAGGTGGTACTT | |
| | CTACTACCTGGGCACCGGCCCCGAGGCCGGCCTGCCCTACGGCGCCA | |
| | ACAAGGACGGCATCATCTGGGTGGCCACCGAGGGCGCCCTGAACACC | |
| | CCCAAGGACCACATCGGCACCAGGAACCCCGCCAACAACGCCGCCAT | |
| | CGTGCTGCAGCTGCCCCAGGGCACCACCCTGCCCAAGGGCTTCTACG | |
| | CCGAGGGCAGCAGGGGCGGCAGCCAGGCCAGCAGCAGGAGCAGCAG | |
| | CAGGAGCAGGAACAGCAGCAGGAACAGCACCCCCGGCAGCAGCAGGG | |
| | GCACCAGCCCCGCCAGGATGGCCGGCAACGGCGGCGACGCCGCCCT | |
| | GGCCCTGCTGCTGCTGGACAGGCTGAACCAGCTGGAGAGCAAGATGA | |
| | GCGGCAAGGGCCAGCAGCAGCAGGGCCAGACCGTGACCAAGAAGAGC | |
| | GCCGCCGAGGCCAGCAAGAAGCCCAGGCAGAAGAGGACCGCCACCAA | |
| | GGCCTACAACGTGACCCAGGCCTTCGGCAGGAGGGGCCCCGAGCAGA | |
| | CCCAGGGCAACTTCGGCGACCAGGAGCTGATCAGGCAGGGCACCGAC | |
| | TACAAGCACTGGCCCCAGATCGCCCAGTTCGCCCCCAGCGCCAGCGC | |
| | CTTCTTCGGCATGAGCAGGATCGGCATGGAGGTGACCCCCAGCGGCA | |
| | CCTGGCTGACCTACACCGGCGCCATCAAGCTGGACGACAAGGACCCC | |
| | AACTTCAAGGACCAGGTGATCCTGCTGAACAAGCACATCGACGCCTAC | |
| | AAGACCTTCCCCCCCACCGAGCCCAAGAAGGACAAGAAGAAGAAGGCC | |
| | GACGAGACCCAGGCCCTGCCCCAGAGGCAGAAGAAGCAGCAGACCGT | |
| | GACCCTGCTGCCCGCCGCCGACCTGGACGACTTCAGCAAGCAGCTGC | |
| | AGCAGAGCATGAGCAGCGCCGACAGCACCCAGGCCTGATGA | |

[0301] As mentioned above, the present invention is not limited to the examples in Table 9. In some embodiments, vaccine candidates may comprise various pieces (e.g. promoters, proteins, adjuvants) as shown described herein.

[0302] The present invention may further feature a pan-coronavirus recombinant vaccine composition, the composition comprising one or more large sequences, wherein each of the one or more large sequences comprise conserved regions of a coronavirus. For example, Table 10 features non-limiting examples of proteins comprising conserved region from a coronavirus that may be used in the compositions described herein.

[0303] Table 10 shows non-limiting examples of proteins that may be used to create a vaccine composition described herein. In some embodiments, proteins listed below may be arranged in a plurality of combinations. In some embodiments, the proteins may be directly linked together. In other embodiments, the proteins are linked together via a linker.

TABLET0

| | | SEQ ID |
|---|---|---|
| Proteins | Sequence | NO: |
| Spike glycoprotein | ATGTTCGTGTTCCTGGTGCTGCTGCCCCTGGTGAGCAGCCAGTG | 148 |
| with 6 stabilizing | CGTGAACCTGACCACCCGGACCCAGCTGCCACCAGCCTACACC | |
| mutations | AACAGCTTCACCCGGGGCGTCTACTACCCCGACAAGGTGTTCCG | |
| (HexaPro) | GAGCAGCGTCCTGCACAGCACCCAGGACCTGTTCCTGCCCTTCT | |
| | TCAGCAACGTGACCTGGTTCCACGCCATCCACGTGAGCGGCAC | |
| | CAACGGCACCAAGCGGTTCGACAACCCCGTGCTGCCCTTCAAC | |
| | GACGGCGTGTACTTCGCCAGCACCGAGAAGAGCAACATCATCC | |
| | GGGGCTGGATCTTCGGCACCACCCTGGACAGCAAGACCCAGAG | |
| | CCTGCTGATCGTGAATAACGCCACCAACGTGGTGATCAAGGTGT | |
| | GCGAGTTCCAGTTCTGCAACGACCCCTTCCTGGGCGTGTACTAC | |
| | CACAAGAACAACAAGAGCTGGATGGAGAGCGAGTTCCGGGTGT | |
| | ACAGCAGCGCCAACAACTGCACCTTCGAGTACGTGAGCCAGCC | |
| | CTTCCTGATGGACCTGGAGGGCAAGCAGGGCAACTTCAAGAACC | |
| | TGCGGGAGTTCGTGTTCAAGAACATCGACGGCTACTTCAAGATC | |
| | TACAGCAAGCACACCCCAATCAACCTGGTGCGGGATCTGCCCCA | |
| | GGGCTTCTCAGCCCTGGAGCCCCTGGTGGACCTGCCCATCGGC | |
| | ATCAACATCACCCGGTTCCAGACCCTGCTGGCCCTGCACCGGAG | |
| | CTACCTGACCCCAGGCGACAGCAGCAGCGGGTGGACAGCAGGC | |
| | GCGGCTGCTTACTACGTGGGCTACCTGCAGCCCCGGACCTTCCT | |
| | GCTGAAGTACAACGAGAACGGCACCATCACCGACGCCGTGGAC | |
| | TGCGCCCTGGACCCTCTGAGCGAGACCAAGTGCACCCTGAAGA | |
| | GCTTCACCGTGGAGAAGGGCATCTACCAGACCAGCAACTTCCGG | |
| | GTGCAGCCCACCGAGAGCATCGTGCGGTTCCCCAACATCACCAA | |
| | CCTGTGCCCCTTCGGCGAGGTGTTCAACGCCACCCGGTTCGCC | |
| | AGCGTGTACGCCTGGAACCGGAAGCGGATCAGCAACTGCGTGG | |
| | CCGACTACAGCGTGCTGTACAACAGCGCCAGCTTCAGCACCTTC | |
| | AAGTGCTACGGCGTGAGCCCCACCAAGCTGAACGACCTGTGCTT | |
| | CACCAACGTGTACGCCGACAGCTTCGTGATCCGTGGCGACGAG | |
| | GTGCGGCAGATCGCACCCGGCCAGACAGGCAAGATCGCCGACT | |
| | ACAACTACAAGCTGCCCGACGACTTCACCGGCTGCGTGATCGCC | |
| | TGGAACAGCAACAACCTCGACAGCAAGGTGGGCGGCAACTACA | |
| | ACTACCTGTACCGGCTGTTCCGGAAGAGCAACCTGAAGCCCTTC | |
| | GAGCGGGACATCAGCACCGAGATCTACCAAGCCGGCTCCACCC | |
| | CTTGCAACGGCGTGGAGGGCTTCAACTGCTACTTCCCTCTGCAG | |
| | AGCTACGGCTTCCAGCCCACCAACGGCGTGGGCTACCAGCCCT | |
| | ACCGGGTGGTGGTGCTGAGCTTCGAGCTGCTGCACGCCCCAGC | |
| | CACCGTGTGTGGCCCCAAGAAGAGCACCAACCTGGTGAAGAAC | |
| | AAGTGCGTGAACTTCAACTTCAACGGCCTTACCGGCACCGGCGT | |
| | GCTGACCGAGAGCAACAAGAAATTCCTGCCCTTTCAGCAGTTCG | |
| | GCCGGGACATCGCCGACACCACCGACGCTGTGCGGGATCCCCA | |
| | GACCCTGGAGATCCTGGACATCACCCCTTGCAGCTTCGGCGGC | |
| | GTGAGCGTGATCACCCCAGGCACCAACACCAGCAACCAGGTGG | |
| | CCGTGCTGTACCAGGACGTGAACTGCACCGAGGTGCCCGTGGC | |
| | CATCCACGCCGACCAGCTGACACCCACCTGGCGGGTCTACAGC | |
| | ACCGGCAGCAACGTGTTCCAGACCCGGGCCGGTTGCCTGATCG | |
| | GCGCCGAGCACGTGAACAACAGCTACGAGTGCGACATCCCCAT | |
| | CGGCGCCGGCATCTGTGCCAGCTACCAGACCCAGACCAATTCA | |
| | CCCGGCAGCGCCAGCAGCGTGGCCAGCCAGAGCATCATCGCCT | |
| | ACACCATGAGCCTGGGCGCCGAGAACAGCGTGGCCTACAGCAA | |
| | CAACAGCATCGCCATCCCCACCAACTTCACCATCAGCGTGACCA | |
| | CCGAGATTCTGCCCGTGAGCATGACCAAGACCAGCGTGGACTG | |
| | CACCATGTACATCTGCGGCGACAGCACCGAGTGCAGCAACCTG | |
| | CTGCTGCAGTACGGCAGCTTCTGCACCCAGCTGAACCGGGCCC | |
| | TGACCGGCATCGCCGTGGAGCAGGACAAGAACACCCAGGAGGT | |
| | GTTCGCCCAGGTGAAGCAGATCTACAAGACCCCTCCCATCAAGG | |
| | ACTTCGGCGGCTTCAACTTCAGCCAGATCCTGCCCGACCCCAGC | |
| | AAGCCCAGCAAGCGGAGCCCCATCGAGGACCTGCTGTTCAACA | |
| | AGGTGACCCTAGCCGACGCCGGCTTCATCAAGCAGTACGGCGA | |
| | CTGCCTCGGCGACATAGCCGCCCGGGACCTGATCTGCGCCCAG | |
| | AAGTTCAACGGCCTGACCGTGCTGCCTCCCCTGCTGACCGACGA | |
| | GATGATCGCCCAGTACACCAGCGCCCTGTTAGCCGGAACCATCA | |
| | CCAGCGGCTGGACTTTCGGCGCTGGCCCCGCTCTGCAGATCCC | |
| | CTTCCCCATGCAGATGGCCTACCGGTTCAACGGCATCGGCGTGA | |
| | CCCAGAACGTGCTGTACGAGAACCAGAAGCTGATCGCCAACCAG | |
| | TTCAACAGCGCCATCGGCAAGATCCAGGACAGCCTGAGCAGCA | |
| | CCCCTAGCGCCCTGGGCAAGCTGCAGGACGTGGTGAACCAGAA | |
| | CGCCCAGGCCCTGAACACCCTGGTGAAGCAGCTGAGCAGCAAC | |
| | TTCGGCGCCATCAGCAGCGTGCTGAACGACATCCTGAGCCGGC | |
| | TGGACCCTCCCGAGGCCGAGGTGCAGATCGACCGGCTGATCAC | |
| | TGGCCGGCTGCAGAGCCTGCAGACCTACGTGACCCAGCAGCTG | |
| | ATCCGGGCCGCCGAGATTCGGGCCAGCGCCAACCTGGCCGCCA | |
| | CCAAGATGAGCGAGTGCGTGCTGGGCCAGAGCAAGCGGGTGGA | |
| | CTTCTGCGGCAAGGGCTACCACCTGATGAGCTTTCCCCAGAGCG | |
| | CACCCCACGGAGTGGTGTTCCTGCACGTGACCTACGTGCCCGC | |
| | CCAGGAGAAGAACTTCACCACCGCCCCAGCCATCTGCCACGAC | |
| | GGCAAGGCCCACTTTCCCCGGGAGGGCGTGTTCGTGAGCAACG | |
| | GCACCCACTGGTTCGTGACCCAGCGGAACTTCTACGAGCCCCA | |
| | GATCATCACCACCGACAACACCTTCGTGAGCGGCAACTGCGACG | |
| | TGGTGATCGGCATCGTGAACAACACCGTGTACGATCCCCTGCAG | |
| | CCCGAGCTGGACAGCTTCAAGGAGGAGCTGGACAAGTACTTCAA | |
| | GAATCACACCAGCCCCGACGTGGACCTGGGCGACATCAGCGGC | |
| | ATCAACGCCAGCGTGGTGAACATCCAGAAGGAGATCGATCGGCT | |
| | GAACGAGGTGGCCAAGAACCTGAACGAGAGCCTGATCGACCTG | |
| | CAGGAGCTGGGCAAGTACGAGCAGTACATCAAGTGGCCCTGGT | |
| | ACATCTGGCTGGGCTTCATCGCCGGCCTGATCGCCATCGTGATG | |
| | GTGACCATCATGCTGTGCTGCATGACCAGCTGCTGCAGCTGCCT | |
| | GAAGGGCTGTTGCAGCTGCGGCAGCTGCTGCAAGTTCGACGAG | |
| | GACGACAGCGAGCCCGTGCTGAAGGGCGTGAAGCTGCACTACA | |
| | CCTGATAATAGGCTGGAGCCTCGGTGGCCTAGCTTCTTGCCCCT | |
| | TGGGCCTCCCCCCAGCCCCTCCTCCCCTTCCTGCACCCGTACCC | |
| | CCGTGGTCTTTGAATAAAGTCTGAGTGGGCGGCAAAAAAAAA | |
| Spike | ATGTTCGTGTTCCTGGTGCTGCTGCCCCTGGTGAGCAGCCAGTG | 143 |
| glycoprotein | CGTGAACCTGACCACCCGGACCCAGCTGCCACCAGCCTACACC | |
| with one | AACAGCTTCACCCGGGGCGTCTACTACCCCGACAAGGTGTTCCG | |
| stabilizing | GAGCAGCGTCCTGCACAGCACCCAGGACCTGTTCCTGCCCTTCT | |
| mutations | TCAGCAACGTGACCTGGTTCCACGCCATCCACGTGAGCGGCAC | |
| | CAACGGCACCAAGCGGTTCGACAACCCCGTGCTGCCCTTCAAC | |
| | GACGGCGTGTACTTCGCCAGCACCGAGAAGAGCAACATCATCC | |
| | GGGGCTGGATCTTCGGCACCACCCTGGACAGCAAGACCCAGAG | |
| | CCTGCTGATCGTGAATAACGCCACCAACGTGGTGATCAAGGTGT | |
| | GCGAGTTCCAGTTCTGCAACGACCCCTTCCTGGGCGTGTACTAC | |
| | CACAAGAACAACAAGAGCTGGATGGAGAGCGAGTTCCGGGTGT | |
| | ACAGCAGCGCCAACAACTGCACCTTCGAGTACGTGAGCCAGCC | |
| | CTTCCTGATGGACCTGGAGGGCAAGCAGGGCAACTTCAAGAACC | |
| | TGCGGGAGTTCGTGTTCAAGAACATCGACGGCTACTTCAAGATC | |
| | TACAGCAAGCACACCCCAATCAACCTGGTGCGGGATCTGCCCCA | |
| | GGGCTTCTCAGCCCTGGAGCCCCTGGTGGACCTGCCCATCGGC | |
| | ATCAACATCACCCGGTTCCAGACCCTGCTGGCCCTGCACCGGAG | |
| | CTACCTGACCCCAGGCGACAGCAGCAGCGGGTGGACAGCAGGC | |
| | GCGGCTGCTTACTACGTGGGCTACCTGCAGCCCCGGACCTTCCT | |
| | GCTGAAGTACAACGAGAACGGCACCATCACCGACGCCGTGGAC | |
| | TGCGCCCTGGACCCTCTGAGCGAGACCAAGTGCACCCTGAAGA | |
| | GCTTCACCGTGGAGAAGGGCATCTACCAGACCAGCAACTTCCGG | |
| | GTGCAGCCCACCGAGAGCATCGTGCGGTTCCCCAACATCACCAA | |
| | CCTGTGCCCCTTCGGCGAGGTGTTCAACGCCACCCGGTTCGCC | |
| | AGCGTGTACGCCTGGAACCGGAAGCGGATCAGCAACTGCGTGG | |
| | CCGACTACAGCGTGCTGTACAACAGCGCCAGCTTCAGCACCTTC | |
| | AAGTGCTACGGCGTGAGCCCCACCAAGCTGAACGACCTGTGCTT | |
| | CACCAACGTGTACGCCGACAGCTTCGTGATCCGTGGCGACGAG | |
| | GTGCGGCAGATCGCACCCGGCCAGACAGGCAAGATCGCCGACT | |
| | ACAACTACAAGCTGCCCGACGACTTCACCGGCTGCGTGATCGCC | |
| | TGGAACAGCAACAACCTCGACAGCAAGGTGGGCGGCAACTACA | |
| | ACTACCTGTACCGGCTGTTCCGGAAGAGCAACCTGAAGCCCTTC | |
| | GAGCGGGACATCAGCACCGAGATCTACCAAGCCGGCTCCACCC | |
| | CTTGCAACGGCGTGGAGGGCTTCAACTGCTACTTCCCTCTGCAG | |
| | AGCTACGGCTTCCAGCCCACCAACGGCGTGGGCTACCAGCCCT | |
| | ACCGGGTGGTGGTGCTGAGCTTCGAGCTGCTGCACGCCCCAGC | |
| | CACCGTGTGTGGCCCCAAGAAGAGCACCAACCTGGTGAAGAAC | |
| | AAGTGCGTGAACTTCAACTTCAACGGCCTTACCGGCACCGGCGT | |
| | GCTGACCGAGAGCAACAAGAAATTCCTGCCCTTTCAGCAGTTCG | |
| | GCCGGGACATCGCCGACACCACCGACGCTGTGCGGGATCCCCA | |
| | GACCCTGGAGATCCTGGACATCACCCCTTGCAGCTTCGGCGGC | |
| | GTGAGCGTGATCACCCCAGGCACCAACACCAGCAACCAGGTGG | |
| | CCGTGCTGTACCAGGACGTGAACTGCACCGAGGTGCCCGTGGC | |
| | CATCCACGCCGACCAGCTGACACCCACCTGGCGGGTCTACAGC | |
| | ACCGGCAGCAACGTGTTCCAGACCCGGGCCGGTTGCCTGATCG | |
| | GCGCCGAGCACGTGAACAACAGCTACGAGTGCGACATCCCCAT | |
| | CGGCGCCGGCATCTGTGCCAGCTACCAGACCCAGACCAATTCA | |
| | CCCGGCAGCGCCAGCAGCGTGGCCAGCCAGAGCATCATCGCCT | |
| | ACACCATGAGCCTGGGCGCCGAGAACAGCGTGGCCTACAGCAA | |
| | CAACAGCATCGCCATCCCCACCAACTTCACCATCAGCGTGACCA | |
| | CCGAGATTCTGCCCGTGAGCATGACCAAGACCAGCGTGGACTG | |
| | CACCATGTACATCTGCGGCGACAGCACCGAGTGCAGCAACCTG | |
| | CTGCTGCAGTACGGCAGCTTCTGCACCCAGCTGAACCGGGCCC | |
| | TGACCGGCATCGCCGTGGAGCAGGACAAGAACACCCAGGAGGT | |
| | GTTCGCCCAGGTGAAGCAGATCTACAAGACCCCTCCCATCAAGG | |
| | ACTTCGGCGGCTTCAACTTCAGCCAGATCCTGCCCGACCCCAGC | |
| | AAGCCCAGCAAGCGGAGCCCCATCGAGGACCTGCTGTTCAACA | |
| | AGGTGACCCTAGCCGACGCCGGCTTCATCAAGCAGTACGGCGA | |
| | CTGCCTCGGCGACATAGCCGCCCGGGACCTGATCTGCGCCCAG | |
| | AAGTTCAACGGCCTGACCGTGCTGCCTCCCCTGCTGACCGACGA | |
| | GATGATCGCCCAGTACACCAGCGCCCTGTTAGCCGGAACCATCA | |
| | CCAGCGGCTGGACTTTCGGCGCTGGCCCCGCTCTGCAGATCCC | |
| | CTTCCCCATGCAGATGGCCTACCGGTTCAACGGCATCGGCGTGA | |
| | CCCAGAACGTGCTGTACGAGAACCAGAAGCTGATCGCCAACCAG | |
| | TTCAACAGCGCCATCGGCAAGATCCAGGACAGCCTGAGCAGCA | |
| | CCCCTAGCGCCCTGGGCAAGCTGCAGGACGTGGTGAACCAGAA | |
| | CGCCCAGGCCCTGAACACCCTGGTGAAGCAGCTGAGCAGCAAC | |
| | TTCGGCGCCATCAGCAGCGTGCTGAACGACATCCTGAGCCGGC | |
| | TGGACCCTCCCGAGGCCGAGGTGCAGATCGACCGGCTGATCAC | |
| | TGGCCGGCTGCAGAGCCTGCAGACCTACGTGACCCAGCAGCTG | |
| | ATCCGGGCCGCCGAGATTCGGGCCAGCGCCAACCTGGCCGCCA | |
| | CCAAGATGAGCGAGTGCGTGCTGGGCCAGAGCAAGCGGGTGGA | |
| | CTTCTGCGGCAAGGGCTACCACCTGATGAGCTTTCCCCAGAGCG | |
| | CACCCCACGGAGTGGTGTTCCTGCACGTGACCTACGTGCCCGC | |
| | CCAGGAGAAGAACTTCACCACCGCCCCAGCCATCTGCCACGAC | |
| | GGCAAGGCCCACTTTCCCCGGGAGGGCGTGTTCGTGAGCAACG | |
| | GCACCCACTGGTTCGTGACCCAGCGGAACTTCTACGAGCCCCA | |
| | GATCATCACCACCGACAACACCTTCGTGAGCGGCAACTGCGACG | |
| | TGGTGATCGGCATCGTGAACAACACCGTGTACGATCCCCTGCAG | |
| | CCCGAGCTGGACAGCTTCAAGGAGGAGCTGGACAAGTACTTCAA | |
| | GAATCACACCAGCCCCGACGTGGACCTGGGCGACATCAGCGGC | |
| | ATCAACGCCAGCGTGGTGAACATCCAGAAGGAGATCGATCGGCT | |
| | GAACGAGGTGGCCAAGAACCTGAACGAGAGCCTGATCGACCTG | |
| | CAGGAGCTGGGCAAGTACGAGCAGTACATCAAGTGGCCCTGGT | |
| | ACATCTGGCTGGGCTTCATCGCCGGCCTGATCGCCATCGTGATG | |
| | GTGACCATCATGCTGTGCTGCATGACCAGCTGCTGCAGCTGCCT | |
| | GAAGGGCTGTTGCAGCTGCGGCAGCTGCTGCAAGTTCGACGAG | |
| | GACGACAGCGAGCCCGTGCTGAAGGGCGTGAAGCTGCACTACA | |
| | CCTGATAATAGGCTGGAGCCTCGGTGGCCTAGCTTCTTGCCCCT | |
| | TGGGCCTCCCCCCAGCCCCTCCTCCCCTTCCTGCACCCGTACCC | |
| | CCGTGGTCTTTGAATAAAGTCTGAGTGGGCGGCAAAAAAAAA | |
| Nucleocapsid | ATGAGCGACAACGGCCCCCAGAACCAGAGGAACGCCCCCAGGA | 150 |
| | TCACCTTCGGCGGCCCCAGCGACAGCACCGGCAGCAACCAGAA | |
| | CGGCGAGAGGAGCGGCGCCAGGAGCAAGCAGAGGAGGCCCCA | |
| | GGGCCTGCCCAACAACACCGCCAGCTGGTTCACCGCCCTGACC | |
| | CAGCACGGCAAGGAGGACCTGAAGTTCCCCAGGGGCCAGGGC | |
| | GTGCCCATCAACACCAACAGCAGCCCCGACGACCAGATCGGCT | |
| | ACTACAGGAGGGCCACCAGGAGGATCAGGGGCGGCGACGGCA | |
| | AGATGAAGGACCTGAGCCCCAGGTGGTACTTCTACTACCTGGGC | |
| | ACCGGCCCCGAGGCCGGCCTGCCCTACGGCGCCAACAAGGAC | |
| | GGCATCATCTGGGTGGCCACCGAGGGCGCCCTGAACACCCCCA | |
| | AGGACCACATCGGCACCAGGAACCCCGCCAACAACGCCGCCAT | |
| | CGTGCTGCAGCTGCCCCAGGGCACCACCCTGCCCAAGGGCTTC | |
| | TACGCCGAGGGCAGCAGGGGCGGCAGCCAGGCCAGCAGCAGG | |
| | AGCAGCAGCAGGAGCAGGAACAGCAGCAGGAACAGCACCCCCG | |
| | GCAGCAGCAGGGGCACCAGCCCCGCCAGGATGGCCGGCAACG | |
| | GCGGCGACGCCGCCCTGGCCCTGCTGCTGCTGGACAGGCTGAA | |
| | CCAGCTGGAGAGCAAGATGAGCGGCAAGGGCCAGCAGCAGCAG | |
| | GGCCAGACCGTGACCAAGAAGAGCGCCGCCGAGGCCAGCAAGA | |
| | AGCCCAGGCAGAAGAGGACCGCCACCAAGGCCTACAACGTGAC | |
| | CCAGGCCTTCGGCAGGAGGGGCCCCGAGCAGACCCAGGGCAA | |
| | CTTCGGCGACCAGGAGCTGATCAGGCAGGGCACCGACTACAAG | |
| | CACTGGCCCCAGATCGCCCAGTTCGCCCCCAGCGCCAGCGCCT | |
| | TCTTCGGCATGAGCAGGATCGGCATGGAGGTGACCCCCAGCGG | |
| | CACCTGGCTGACCTACACCGGCGCCATCAAGCTGGACGACAAG | |
| | GACCCCAACTTCAAGGACCAGGTGATCCTGCTGAACAAGCACAT | |
| | CGACGCCTACAAGACCTTCCCCCCCACCGAGCCCAAGAAGGAC | |
| | AAGAAGAAGAAGGCCGACGAGACCCAGGCCCTGCCCCAGAGGC | |
| | AGAAGAAGCAGCAGACCGTGACCCTGCTGCCCGCCGCCGACCT | |
| | GGACGACTTCAGCAAGCAGCTGCAGCAGAGCATGAGCAGCGCC | |
| | GACAGCACCCAGGCC | |
| ORFtab (non- | CAAACCACTGAAACAGCWCACTCTTGTAATGTTAACCGCTTTAAT | 151 |
| annotated) | GTGGCTATTACAAGAGCAAAAATTGGCATTGTGCATAATGTCT | |
| | GACAGAGATCTTTATGACAAGCTGCAATTCACAAGTCTAGAAGTA | |
| | CCGCGTCGTAACGTGGCTACATTACAAGCGGAAAATGTAACTGG | |
| | ACTCTTTAAGGACTGTAGTAAGATCATAACTGGTCTTCATCCTAC | |
| | ACAAGCACCTACACACCTTAGTGTTGATACAAAATTCAAGACTGA | |
| | GGGACTATGTGTTGACATACCAGGCATWCCWAAGGACATGACC | |
| | TATMGWAGACTCATCTCYATGATGGGTTTCAAAATGAATTAYCAA | |
| | GTTAATGGTTACCCTAAYATGTTYATCACCCGYGARGAAGCCATM | |
| | MGMCAYGTWCGTGCATGGATTGGCTTTGATGTAGAGGGKTGTC | |
| | ATGCTACTAGGGATGCTGTCGGTACTAACCTACCTCTCCAGTTAG | |
| | GATTTTCTACAGGTGTTAACTTAGTAGCTGTACCAACTGGCTATG | |
| | TTGACACTGAAAACAATACAGAATTCACCAGAGTTAATGCAAAAC | |
| | CTCCACCAGGTGACCAATTTAAACATCTTATACCACTTATGTACA | |
| | AAGGTTTACCCTGGAACATAGTGCGTATCAAGATAGTACAAATGC | |
| | TCAGTGATACACTGAAAGGATTATCRGACAGAGTTGTGTTTGTCC | |
| | TATGGGCACATGGCTTTGAACTTACATCAATGAAGTACTTTGTCA | |
| | AGATTGGACCTGAAAGAACGTGTTGTCTGTGTGACAAACGTGCA | |
| | ACTTGTTTTTCTACTTCATCAGACAATTATGCCTGCTGGAACCATT | |
| | CTGTGGGTTTTGACTATGTCTATAATCCATTTATGATTGATGTCCA | |
| | GCAGTGGGGTTTTACAGGTAACCTTCAGAGTAATCACGATCAGC | |
| | ATTGCCAAGTGCATGGCAACGCTCATGTGGCTAGTTGTGATGCT | |
| | ATCATGACTAGATGTTTAGCAGTCCATGAGTGCTTTGTTAAGCGC | |
| | GTTGACTGGTCTGTTGAGTACCCAATTATAGGTGATGAACTGAAG | |
| | ATCAATGCCGCATGCAGAAAAGTGCAACATATGGTTGTAAAGTCT | |
| | GCATTGCTTGCTGACAAATTCCCAGTTCTTCATGACATTGGAAAC | |
| | CCAAAGGCTATCAAATGTGTCCCRCAGGCTGAAGTGGATTGGAA | |
| | GTTCTATGATGCTCAGCCCTGCAGTGACAAAGCTTATAAAATAAA | |
| | AGAACTCTTCTATTCTTATGCTACACATCATGATAAATTCATTGAT | |
| | GGTGTTTGTTTATTTTGGAATTGTAACGTTGATCGTTACCCTGCC | |
| | AATGCTATTGTRTGCAGGTTCGACACGAGAGTCTTGTCAAATTTG | |
| | AACTTGCCAGGTTGTGATGGTGGTAGTTTGTATGTAAATAAGCAT | |
| | GCATTCCACACTCCAGCTTTTGATAAAAGTGCATTTACTAATTTAA | |
| | AGCAATTGCCTTTCTTTTATTACTCTGACAGTCCCTGTGAGTCAC | |
| | ATGGCAAGCAGGTTGTTTCTGACATTGATTATGTACCACTCAAAT | |
| | CTGCTACRTGTATAACACGATGCAATTTGGGRGGTGCTGTTTGC | |
| | AGACATCATGCAAATGAGTACCGACAGTACTTGGATGCATACAAT | |
| | ATGATGATTTCTGCTGGCTTTAGCCTCTGGATTTACAAACAGTTT | |
| | GACACTTATAACCTGTGGAACACCTTTACCAGGTTACAGAGTTTA | |
| | GAAAATGTGGCTTACAATGTTGTTAACAAAGGACACTTCGATGGA | |
| | CAAGCTGGTGAAGCACCTGTTTCCGTCATTAATAATGTTGTTTAC | |
| | ACAAAGGTAGATGGTGTTGATGTAGAGATCTTTGAAAACAAGACA | |
| | ACACTTCCTGTTAATGTTGCATTTGAGCTTTGGGCTAAGCGTAAC | |
| | ATTAAACCAGTGCCAGAGATTAAGATACTCAATAATTTGGGTGTC | |
| | GATATCGCTGCTAATACTGTAATCTGGGACTACAAGAGAGAAGC | |
| | ACCAGCACATATGTCAACAATAGGTGTCTGCACAATGACTGACAT | |
| | TGCCAAGAAACCTACTGAGAGTGCTTGTTCCTCGCTTACTGTCTT | |
| | ATTTGATGGTAGAGTGGAAGGACAGGTAGACCTTTTTAGAAATGC | |
| | CCGTAATGGTGTTTTAATAACAGAAGGTTCAGTTAAAGGTTTAAT | |
| | ACCTTCAAAGGGACCAGCACAAGCTAGTGTCAATGGAGTCACAT | |
| | TAATTGGAGAATCAGTAAAAACACAGTTTAATTATTTTAAGAAAGT | |
| | AGATGGCATCATTCAACAGTTGCCTGAAACCTACTTTACTCAGAG | |
| | CCGAGACTTAGAGGATTTCAAGCCCAGATCACAAATGGAAACTG | |
| | ACTTTCTTGAGCTCGCTATGGATGAATTCATACAACGGTACAAGC | |
| | TTGAAGGCTATGCCTTCGAACATATCGTTTATGGAGATAGTC | |
| | ATGGACAGCTTGGTGGACTTCATCTAATGATTGGTCTAGCTAAGC | |
| | GCTCACAAGATTCACCACTTAAATTAGAGGATTTTATCCCTACGG | |
| | ACAGTACAGTGAAAAATTATTTCATAACAGATGCGCAAACAGGTT | |
| | CATCAAAATGCGTGTGCTCTGTTATTGATCTTCTGCTTGATGACT | |
| | TTGTTGAGATAATAAAGTCACAAGATTTATCAGTGGTTTCAAAGG | |
| | TGGTCAAAGTCACAATTGACTATGCTGAAATTTCATTCATGTTATG | |
| | GTGTAAGGATGGACATGTTGAAACCTTACCCAAAATTACAAGC | |
| | GAGTCAGGCGTGGCAACCAGGAGTTGCAATGCCTAACTTGTATA | |
| | AGATGCAGAGAATGCTTCTTGAAAAATGTGACCTTCAGAATTATG | |
| | GTGAAAATGCTGTCATACCAAARGGAATAATGATGAATGTCGCAA | |
| | AATATACTCAACTGTGTCAATATTTAAATACACTYACATTAGCYGT | |
| | GCCATATAATATGAGAGTTATCCAMTTGGTGCTGGCTCRGACAA | |
| | AGGAGTTGCACCCGGCACAGCTGTTCTCAGACAGTGGTTGCCAA | |
| | TTGGCACACTACTTGTTGATTCAGATCTTAACGACTTCGTCTCTG | |
| | ACGCTGATTCCACTCTAATTGGAGACTGTGCAACCGTACATACAG | |
| | CTAACAAATGGGATCTCATTATTAGCGATATGTATGATCCTAAAA | |
| | CCAAACACGTGACAAAGGAAAATGATTCAAAAGAAGGATTTTTCA | |
| | CTTACCTGTGTGGATTTATTAAACAAAAATTAGCCCTGGGAGGCT | |
| | CTGTGGCTGTAAAGATAACTGAGCATTCTTGGAATGCGGATCTCT | |
| | ACAAGCTCATGGGACATTTCTCATGGTGGACAGCTTTTGTTACAA | |
| | ATGTTAATGCATCTTCATCAGAAGCATTTTTAATTGGAGTTAACTA | |
| | TCTTGGTAAGCCAAAAGAACAAATTGATGGTTACACCATGCATGC | |
| | TAACTACATTCTGGAGGAATACAAACCCGATTCAATTGTCTTC | |
| | CTATTCACTTTTTGACATGAGTAAGTTCCCTCTTAAATTAAGGGGA | |
| | ACAGCTGTCATGTCTTTAAAGGAGAACCAAATCAATGAAATGATT | |
| | TATTCTCTACTTGAAAAAGGCAGACTTATCATTAGGGAAAACAAC | |
| | AGAGTTGTTGTCTCAAGTGATGTTCTTGTTAATAACTAAACGAAC | |
| | A | |
| Orfta/b | GACCAGGAACCCCGCCTGGAGGAAGGCCGTGTTCATCAGCCCC | 348 |
| | TACAACAGCCAGAACGCCGTGGCCAGCAAGATCCTGGGCCTGC | |
| | CCACCCAGACCGTGGACAGCAGCCAGGGCAGCGAGTACGACTA | |
| | CGTGATCTTCACCCAGACCACCGAGACCGCCCACAGCTGCAAC | |
| | GTGAACAGGTTCAACGTGGCCATCACCAGGGCCAAGGTGGGCA | |
| | TCCTGTGCATCATGAGCGACAGGGACCTGTACGACAAGCTGCAG | |
| | TTCACCAGCCTGGAGATCCCCAGGAGGAACGTGGCCACCCTGC | |
| | AGGCCGAGAACGTGACCGGCCTGTTCAAGGACTGCAGCAAGGT | |
| | GATCACCGGCCTGCACCCCACCCAGGCCCCCACCCACCTGAGC | |
| | GTGGACACCAAGTTCAAGACCGAGGGCCTGTGCGTGGACATCC | |
| | CCGGCATCCCCAAGGACATGACCTACAGGAGGCTGATCAGCAT | |
| | GATGGGCTTCAAGATGAACTACCAGGTGAACGGCTACCCCAACA | |
| | TGTTCATCACCAGGGAGGAGGCCATCAGGCACGTGAGGGCCTG | |
| | GATCGGCTTCGACGTGGAGGGCTGCCACGCCACCAGGGAGGCC | |
| | GTGGGCACCAACCTGCCCCTGCAGCTGGGCTTCAGCACCGGCG | |
| | TGAACCTGGTGGCCGTGCCCACCGGCTACGTGGACACCCCCAA | |
| | CAACACCGACTTCAGCAGGGTGAGCGCCAAGCCCCCCCCCGGC | |
| | GACCAGTTCAAGCACCTGATCCCCCTGATGTACAAGGGCCTGCC | |
| | CTGGAACGTGGTGAGGATCAAGATCGTGCAGATGCTGAGCGAC | |
| | ACCCTGAAGAACCTGAGCGACAGGGTGGTGTTCGTGCTGTGGG | |
| | CCCACGGCTTCGAGCTGACCAGCATGAAGTACTTCGTGAAGATC | |
| | GGCCCCGAGAGGACCTGCTGCCTGTGCGACAGGAGGGCCACCT | |
| | GCTTCAGCACCGCCAGCGACACCTACGCCTGCTGGCACCACAG | |
| | CATCGGCTTCGACTACGTGTACAACCCCTTCATGATCGACGTGC | |
| | AGCAGTGGGGCTTCACCGGCAACCTGCAGAGCAACCACGACCT | |
| | GTACTGCCAGGTGCACGGCAACGCCCACGTGGCCAGCTGCGAC | |
| | GCCATCATGACCAGGTGCCTGGCCGTGCACGAGTGCTTCGTGA | |
| | AGAGGGTGGACTGGACCATCGAGTACCCCATCATCGGCGACGA | |
| | GCTGAAGATCAACGCCGCCTGCAGGAAGGTGCAGCACATGGTG | |
| | GTGAAGGCCGCCCTGCTGGCCGACAAGTTCCCCGTGCTGCACG | |
| | ACATCGGCAACCCCAAGGCCATCAAGTGCGTGCCCCAGGCCGA | |
| | CGTGGAGTGGAAGTTCTACGACGCCCAGCCCTGCAGCGACAAG | |
| | GCCTACAAGATCGAGGAGCTGTTCTACAGCTACGCCACCCACAG | |
| | CGACAAGTTCACCGACGGCGTGTGCCTGTTCTGGAACTGCAACG | |
| | TGGACAGGTACCCCGCCAACAGCATCGTGTGCAGGTTCGACAC | |
| | CAGGGTGCTGAGCAACCTGAACCTGCCCGGCTGCGACGGCGGC | |
| | AGCCTGTACGTGAACAAGCACGCCTTCCACACCCCCGCCTTCGA | |
| | CAAGAGCGCCTTCGTGAACCTGAAGCAGCTGCCCTTCTTCTACT | |
| | ACAGCGACAGCCCCTGCGAGAGCCACGGCAAGCAGGTGGTGAG | |
| | CGACATCGACTACGTGCCCCTGAAGAGCGCCACCTGCATCACCA | |
| | GGTGCAACCTGGGCGGCGCCGTGTGCAGGCACCACGCCAACGA | |
| | GTACAGGCTGTACCTGGACGCCTACAACATGATGATCAGCGCCG | |
| | GCTTCAGCCTGTGGGTGTACAAGCAGTTCGACACCTACAACCTG | |
| | TGGAACACCTTCACCAGGCTGCAGAGCCTGGAGAACGTGGCCTT | |
| | CAACGTGGTGAACAAGGGCCACTTCGACGGCCAGCAGGGCGAG | |
| | GTGCCCGTGAGCATCATCAACAACACCGTGTACACCAAGGTGGA | |
| | CGGCGTGGACGTGGAGCTGTTCGAGAACAAGACCACCCTGCCC | |
| | GTGAACGTGGCCTTCGAGCTGTGGGCCAAGAGGAACATCAAGC | |
| | CCGTGCCCGAGGTGAAGATCCTGAACAACCTGGGCGTGGACAT | |
| | CGCCGCCAACACCGTGATCTGGGACTACAAGAGGGACGCCCCC | |
| | GCCCACATCAGCACCATCGGCGTGTGCAGCATGACCGACATCG | |
| | CCAAGAAGCCCACCGAGACCATCTGCGCCCCCCTGACCGTGTT | |
| | CTTCGACGGCAGGGTGGACGGCCAGGTGGACCTGTTCAGGAAC | |
| | GCCAGGAACGGCGTGCTGATCACCGAGGGCAGCGTGAAGGGC | |
| | CTGCAGCCCAGCGTGGGCCCCAAGCAGGCCAGCCTGAACGGC | |
| | GTGACCCTGATCGGCGAGGCCGTGAAGACCCAGTTCAACTACTA | |
| | CAAGAAGGTGGACGGCGTGGTGCAGCAGCTGCCCGAGACCTAC | |
| | TTCACCCAGAGCAGGAACCTGCAGGAGTTCAAGCCCAGGAGCC | |
| | AGATGGAGATCGACTTCCTGGAGCTGGCCATGGACGAGTTCATC | |
| | GAGAGGTACAAGCTGGAGGGCTACGCCTTCGAGCACATCGTGT | |
| | ACGGCGACTTCAGCCACAGCCAGCTGGGCGGCCTGCACCTGCT | |
| | GATCGGCCTGGCCAAGAGGTTCAAGGAGAGCCCCTTCGAGCTG | |
| | GAGGACTTCATCCCCATGGACAGCACCGTGAAGAACTACTTCAT | |
| | CACCGACGCCCAGACCGGCAGCAGCAAGTGCGTGTGCAGCGTG | |
| | ATCGACCTGCTGCTGGACGACTTCGTGGAGATCATCAAGAGCCA | |
| | GGACCTGAGCGTGGTGAGCAAGGTGGTGAAGGTGACCATCGAC | |
| | TACACCGAGATCAGCTTCATGCTGTGGTGCAAGGACGGCCACGT | |
| | GGAGACCTTCTACCCCAAGCTGCAGAGCAGCCAGGCCTGGCAG | |
| | CCCGGCGTGGCCATGCCCAACCTGTACAAGATGCAGAGGATGC | |
| | TGCTGGAGAAGTGCGACCTGCAGAACTACGGCGACAGCGCCAC | |
| | CCTGCCCAAGGGCATCATGATGAACGTGGCCAAGTACACCCAGC | |
| | TGTGCCAGTACCTGAACACCCTGACCCTGGCCGTGCCCTACAAC | |
| | ATGAGGGTGATCCACTTCGGCGCCGGCAGCGACAAGGGCGTGG | |
| | CCCCCGGCACCGCCGTGCTGAGGCAGTGGCTGCCCACCGGCA | |
| | CCCTGCTGGTGGACAGCGACCTGAACGACTTCGTGAGCGACGC | |
| | CGACAGCACCCTGATCGGCGACTGCGCCACCGTGCACACCGCC | |
| | AACAAGTGGGACCTGATCATCAGCGACATGTACGACCCCAAGAC | |
| | CAAGAACGTGACCAAGGAGAACGACAGCAAGGAGGGCTTCTTCA | |
| | CCTACATCTGCGGCTTCATCCAGCAGAAGCTGGCCCTGGGCGG | |
| | CAGCGTGGCCATCAAGATCACCGAGCACAGCTGGAACGCCGAC | |
| | CTGTACAAGCTGATGGGCCACTTCGCCTGGTGGACCGCCTTCGT | |
| | GACCAACGTGAACGCCAGCAGCAGCGAGGCCTTCCTGATCGGC | |
| | TGCAACTACCTGGGCAAGCCCAGGGAGCAGATCGACGGCTACG | |
| | TGATGCACGCCAACTACATCTTCTGGAGGAACACCAACCCCATC | |
| | CAGCTGAGCAGCTACAGCCTGTTCGACATGAGCAAGTTCCCCCT | |
| | GAAGCT | |
| ORF3a | ATGGACCTGTTCATGAGGATCTTCACCATCGGCACCGTGACCCT | 152 |
| | GAAGCAGGGCGAGATCAAGGACGCCACCCCCAGCGACTTCGTG | |
| | AGGGCCACCGCCACCATCCCCATCCAGGCCAGCCTGCCCTTCG | |
| | GCTGGCTGATCGTGGGCGTGGCCCTGCTGGCCGTGTTCCAGAG | |
| | CGCCAGCAAGATCATCACCCTGAAGAAGAGGTGGCAGCTGGCC | |
| | CTGAGCAAGGGCGTGCACTTCGTGTGCAACCTGCTGCTGCTGTT | |
| | CGTGACCGTGTACAGCCACCTGCTGCTGGTGGCCGCCGGCCTG | |
| | GAGGCCCCCTTCCTGTACCTGTACGCCCTGGTGTACTTCCTGCA | |
| | GAGCATCAACTTCGTGAGGATCATCATGAGGCTGTGGCTGTGCT | |
| | GGAAGTGCAGGAGCAAGAACCCCCTGCTGTACGACGCCAACTA | |
| | CTTCCTGTGCTGGCACACCAACTGCTACGACTACTGCATCCCCT | |
| | ACAACAGCGTGACCAGCAGCATCGTGATCACCAGCGGCGACGG | |
| | CACCACCAGCCCCATCAGCGAGCACGACTACCAGATCGGCGGC | |
| | TACACCGAGAAGTGGGAGAGCGGCGTGAAGGACTGCGTGGTGC | |
| | TGCACAGCTACTTCACCAGCGACTACTACCAGCTGTACAGCACC | |
| | CAGCTGAGCACCGACACCGGCGTGGAGCACGTGACCTTCTTCAT | |
| | CTACAACAAGATCGTGGACGAGCCCGAGGAGCACGTGCAGATC | |
| | CACACCATCGACGGCAGCAGCGGCGTGGTGAACCCCGTGATGG | |
| | AGCCCATCTACGACGAGCCCACCACCACCACCAGCGTGCCCCT | |
| | G | |
| Envelope(E) | ATGTACAGCTTCGTGAGCGAGGAGACCGGCACCCTGATCGTGAA | 153 |
| | CAGCGTGCTGCTGTTCCTGGCCTTCGTGGTGTTCCTGCTGGTGA | |
| | CCCTGGCCATCCTGACCGCCCTGAGGCTGTGCGCCTACTGCTG | |
| | CAACATCGTGAACGTGAGCCTGGTGAAGCCCAGCTTCTACGTGT | |
| | ACAGCAGGGTGAAGAACCTGAACAGCAGCAGGGTGCCCGACCT | |
| | GCTGGTG | |
| Membrane(M) | ATGGCCGACAGCAACGGCACCATCACCGTGGAGGAGCTGAAGA | 154 |
| | AGCTGCTGGAGCAGTGGAACCTGGTGATCGGCTTCCTGTTCCTG | |
| | ACCTGGATCTGCCTGCTGCAGTTCGCCTACGCCAACAGGAACAG | |
| | GTTCCTGTACATCATCAAGCTGATCTTCCTGTGGCTGCTGTGGC | |
| | CCGTGACCCTGGCCTGCTTCGTGCTGGCCGCCGTGTACAGGAT | |
| | CAACTGGATCACCGGCGGCATCGCCATCGCCATGGCCTGCCTG | |
| | GTGGGCCTGATGTGGCTGAGCTACTTCATCGCCAGCTTCAGGCT | |
| | GTTCGCCAGGACCAGGAGCATGTGGAGCTTCAACCCCGAGACC | |
| | AACATCCTGCTGAACGTGCCCCTGCACGGCACCATCCTGACCAG | |
| | GCCCCTGCTGGAGAGCGAGCTGGTGATCGGCGCCGTGATCCTG | |
| | AGGGGCCACCTGAGGATCGCCGGCCACCACCTGGGCAGGTGC | |
| | GACATCAAGGACCTGCCCAAGGAGATCACCGTGGCCACCAGCA | |
| | GGACCCTGAGCTACTACAAGCTGGGCGCCAGCCAGAGGGTGGC | |
| | CGGCGACAGCGGCTTCGCCGCCTACAGCAGGTACAGGATCGGC | |
| | AACTACAAGCTGAACACCGACCACAGCAGCAGCAGCGACAACAT | |
| | CGCCCTGCTGGTGCAG | |
| ORFS | ATGTTCCACCTGGTGGACTTCCAGGTGACCATCGCCGAGATCCT | 155 |
| | GCTGATCATCATGAGGACCTTCAAGGTGAGCATCTGGAACCTGG | |
| | ACTACATCATCAACCTGATCATCAAGAACCTGAGCAAGAGCCTGA | |
| | CCGAGAACAAGTACAGCCAGCTGGACGAGGAGCAGCCCATGGA | |
| | GATCGAC | |
| ORF7a | ATGAAGATCATCCTGTTCCTGGCCCTGATCACCCTGGCCACCTG | 156 |
| | CGAGCTGTACCACTACCAGGAGTGCGTGAGGGGCACCACCGTG | |
| NSP1 | ATGGAGAGCCTGGTGCCCGGCTTCAACGAGAAGACCCACGTGC | 349 |
| | AGCTGAGCCTGCCCGTGCTGCAGGTGAGGGACGTGCTGGTGAG | |
| | GGGCTTCGGCGACAGCGTGGAGGAGGTGCTGAGCGAGGCCAG | |
| | GCAGCACCTGAAGGACGGCACCTGCGGCCTGGTGGAGGTGGA | |
| | GAAGGGCGTGCTGCCCCAGCTGGAGCAGCCCTACGTGTTCATC | |
| | AAGAGGAGCGACGCCAGGACCGCCCCCCACGGCCACGTGATG | |
| | GTGGAGCTGGTGGCCGAGCTGGAGGGCATCCAGTACGGCAGGA | |
| | GCGGCGAGACCCTGGGCGTGCTGGTGCCCCACGTGGGCGAGA | |
| | TCCCCGTGGCCTACAGGAAGGTGCTGCTGAGGAAGAACGGCAA | |
| | CAAGGGCGCCGGCGGCCACAGCTACGGCGCCGACCTGAAGAG | |
| | CTTCGACCTGGGCGACGAGCTGGGCACCGACCCCTACGAGGAC | |
| | TTCCAGGAGAACTGGAACACCAAGCACAGCAGCGGCGTGACCA | |
| | GGGAGCTGATGAGGGAGCTGAACGGCGGC | |
| NSP2 | GCCTACACCAGGTACGTGGACAACAACTTCTGCGGCCCCGACG | 350 |
| | GCTACCCCCTGGAGTGCATCAAGGACCTGCTGGCCAGGGCCGG | |
| | CAAGGCCAGCTGCACCCTGAGCGAGCAGCTGGACTTCATCGAC | |
| | ACCAAGAGGGGCGTGTACTGCTGCAGGGAGCACGAGCACGAGA | |
| | TCGCCTGGTACACCGAGAGGAGCGAGAAGAGCTACGAGCTGCA | |
| | GACCCCCTTCGAGATCAAGCTGGCCAAGAAGTTCGACACCTTCA | |
| | ACGGCGAGTGCCCCAACTTCGTGTTCCCCCTGAACAGCATCATC | |
| | AAGACCATCCAGCCCAGGGTGGAGAAGAAGAAGCTGGACGGCT | |
| | TCATGGGCAGGATCAGGAGCGTGTACCCCGTGGCCAGCCCCAA | |
| | CGAGTGCAACCAGATGTGCCTGAGCACCCTGATGAAGTGCGAC | |
| | CACTGCGGCGAGACCAGCTGGCAGACCGGCGACTTCGTGAAGG | |
| | CCACCTGCGAGTTCTGCGGCACCGAGAACCTGACCAAGGAGGG | |
| | CGCCACCACCTGCGGCTACCTGCCCCAGAACGCCGTGGTGAAG | |
| | ATCTACTGCCCCGCCTGCCACAACAGCGAGGTGGGCCCCGAGC | |
| | ACAGCCTGGCCGAGTACCACAACGAGAGCGGCCTGAAGACCAT | |
| | CCTGAGGAAGGGCGGCAGGACCATCGCCTTCGGCGGCTGCGTG | |
| | TTCAGCTACGTGGGCTGCCACAACAAGTGCGCCTACTGGGTGCC | |
| | CAGGGCCAGCGCCAACATCGGCTGCAACCACACCGGCGTGGTG | |
| | GGCGAGGGCAGCGAGGGCCTGAACGACAACCTGCTGGAGATCC | |
| | TGCAGAAGGAGAAGGTGAACATCAACATCGTGGGCGACTTCAAG | |
| | CTGAACGAGGAGATCGCCATCATCCTGGCCAGCTTCAGCGCCA | |
| | GCACCAGCGCCTTCGTGGAGACCGTGAAGGGCCTGGACTACAA | |
| | GGCCTTCAAGCAGATCGTGGAGAGCTGCGGCAACTTCAAGGTG | |
| | ACCAAGGGCAAGGCCAAGAAGGGCGCCTGGAACATCGGCGAGC | |
| | AGAAGAGCATCCTGAGCCCCCTGTACGCCTTCGCCAGCGAGGC | |
| | CGCCAGGGTGGTGAGGAGCATCTTCAGCAGGACCCTGGAGACC | |
| | GCCCAGAACAGCGTGAGGGTGCTGCAGAAGGCCGCCATCACCA | |
| | TCCTGGACGGCATCAGCCAGTACAGCCTGAGGCTGATCGACGC | |
| | CATGATGTTCACCAGCGACCTGGCCACCAACAACCTGGTGGTGA | |
| | TGGCCTACATCACCGGCGGCGTGGTGCAGCTGACCAGCCAGTG | |
| | GCTGACCAACATCTTCGGCACCGTGTACGAGAAGCTGAAGCCCG | |
| | TGCTGGACTGGCTGGAGGAGAAGTTCAAGGAGGGCGTGGAGTT | |
| | CCTGAGGGACGGCTGGGAGATCGTGAAGTTCATCAGCACCTGC | |
| | GCCTGCGAGATCGTGGGCGGCCAGATCGTGACCTGCGCCAAGG | |
| | AGATCAAGGAGAGCGTGCAGACCTTCTTCAAGCTGGTGAACAAG | |
| | TTCCTGGCCCTGTGCGCCGACAGCATCATCATCGGCGGCGCCA | |
| | AGCTGAAGGCCCTGAACCTGGGCGAGACCTTCGTGACCCACAG | |
| | CAAGGGCCTGTACAGGAAGTGCGTGAAGAGCAGGGAGGAGACC | |
| | GGCCTGCTGATGCCCCTGAAGGCCCCCAAGGAGATCATCTTCCT | |
| | GGAGGGCGAGACCCTGCCCACCGAGGTGCTGACCGAGGAGGT | |
| | GGTGCTGAAGACCGGCGACCTGCAGCCCCTGGAGCAGCCCACC | |
| | AGCGAGGCCGTGGAGGCCCCCCTGGTGGGCACCCCCGTGTGC | |
| | ATCAACGGCCTGATGCTGCTGGAGATCAAGGACACCGAGAAGTA | |
| | CTGCGCCCTGGCCCCCAACATGATGGTGACCAACAACACCTTCA | |
| | CCCTGAAGGGCGGC | |
| Nsp3 | GCCCCCACCAAGGTGACCTTCGGCGACGACACCGTGATCGAGG | 157 |
| | TGCAGGGCTACAAGAGCGTGAACATCACCTTCGAGCTGGACGA | |
| | GAGGATCGACAAGGTGCTGAACGAGAAGTGCAGCGCCTACACC | |
| | GTGGAGCTGGGCACCGAGGTGAACGAGTTCGCCTGCGTGGTGG | |
| | CCGACGCCGTGATCAAGACCCTGCAGCCCGTGAGCGAGCTGCT | |
| | GACCCCCCTGGGCATCGACCTGGACGAGTGGAGCATGGCCACC | |
| | TACTACCTGTTCGACGAGAGCGGCGAGTTCAAGCTGGCCAGCCA | |
| | CATGTACTGCAGCTTCTACCCCCCCGACGAGGACGAGGAGGAG | |
| | GGCGACTGCGAGGAGGAGGAGTTCGAGCCCAGCACCCAGTACG | |
| | AGTACGGCACCGAGGACGACTACCAGGGCAAGCCCCTGGAGTT | |
| | CGGCGCCACCAGCGCCGCCCTGCAGCCCGAGGAGGAGCAGGA | |
| | GGAGGACTGGCTGGACGACGACAGCCAGCAGACCGTGGGCCA | |
| | GCAGGACGGCAGCGAGGACAACCAGACCACCACCATCCAGACC | |
| | ATCGTGGAGGTGCAGCCCCAGCTGGAGATGGAGCTGACCCCCG | |
| | TGGTGCAGACCATCGAGGTGAACAGCTTCAGCGGCTACCTGAAG | |
| | CTGACCGACAACGTGTACATCAAGAACGCCGACATCGTGGAGGA | |
| | GGCCAAGAAGGTGAAGCCCACCGTGGTGGTGAACGCCGCCAAC | |
| | GTGTACCTGAAGCACGGCGGCGGCGTGGCCGGCGCCCTGAACA | |
| | AGGCCACCAACAACGCCATGCAGGTGGAGAGCGACGACTACAT | |
| | CGCCACCAACGGCCCCCTGAAGGTGGGCGGCAGCTGCGTGCTG | |
| | AGCGGCCACAACCTGGCCAAGCACTGCCTGCACGTGGTGGGCC | |
| | CCAACGTGAACAAGGGCGAGGACATCCAGCTGCTGAAGAGCGC | |
| | CTACGAGAACTTCAACCAGCACGAGGTGCTGCTGGCCCCCCTG | |
| | CTGAGCGCCGGCATCTTCGGCGCCGACCCCATCCACAGCCTGA | |
| | GGGTGTGCGTGGACACCGTGAGGACCAACGTGTACCTGGCCGT | |
| | GTTCGACAAGAACCTGTACGACAAGCTGGTGAGCAGCTTCCTGG | |
| | AGATGAAGAGCGAGAAGCAGGTGGAGCAGAAGATCGCCGAGAT | |
| | CCCCAAGGAGGAGGTGAAGCCCTTCATCACCGAGAGCAAGCCC | |
| | AGCGTGGAGCAGAGGAAGCAGGACGACAAGAAGATCAAGGCCT | |
| | GCGTGGAGGAGGTGACCACCACCCTGGAGGAGACCAAGTTCCT | |
| | GACCGAGAACCTGCTGCTGTACATCGACATCAACGGCAACCTGC | |
| | ACCCCGACAGCGCCACCCTGGTGAGCGACATCGACATCACCTTC | |
| | CTGAAGAAGGACGCCCCCTACATCGTGGGCGACGTGGTGCAGG | |
| | AGGGCGTGCTGACCGCCGTGGTGATCCCCACCAAGAAGGCCGG | |
| | CGGCACCACCGAGATGCTGGCCAAGGCCCTGAGGAAGGTGCCC | |
| | ACCGACAACTACATCACCACCTACCCCGGCCAGGGCCTGAACG | |
| | GCTACACCGTGGAGGAGGCCAAGACCGTGCTGAAGAAGTGCAA | |
| | GAGCGCCTTCTACATCCTGCCCAGCATCATCAGCAACGAGAAGC | |
| | AGGAGATCCTGGGCACCGTGAGCTGGAACCTGAGGGAGATGCT | |
| | GGCCCACGCCGAGGAGACCAGGAAGCTGATGCCCGTGTGCGTG | |
| | GAGACCAAGGCCATCGTGAGCACCATCCAGAGGAAGTACAAGG | |
| | GCATCAAGATCCAGGAGGGCGTGGTGGACTACGGCGCCAGGTT | |
| | CTACTTCTACACCAGCAAGACCACCGTGGCCAGCCTGATCAACA | |
| | CCCTGAACGACCTGAACGAGACCCTGGTGACCATGCCCCTGGG | |
| | CTACGTGACCCACGGCCTGAACCTGGAGGAGGCCGCCAGGTAC | |
| | ATGAGGAGCCTGAAGGTGCCCGCCACCGTGAGCGTGAGCAGCC | |
| | CCGACGCCGTGACCGCCTACAACGGCTACCTGACCAGCAGCAG | |
| | CAAGACCCCCGAGGAGCACTTCATCGAGACCATCAGCCTGGCC | |
| | GGCAGCTACAAGGACTGGAGCTACAGCGGCCAGAGCACCCAGC | |
| | TGGGCATCGAGTTCCTGAAGAGGGGCGACAAGAGCGTGTACTA | |
| | CACCAGCAACCCCACCACCTTCCACCTGGACGGCGAGGTGATC | |
| | ACCTTCGACAACCTGAAGACCCTGCTGAGCCTGAGGGAGGTGA | |
| | GGACCATCAAGGTGTTCACCACCGTGGACAACATCAACCTGCAC | |
| Nsp5 | AGCGGCTTCAGGAAGATGGCCTTCCCCAGCGGCAAGGTGGAGG | 158 |
| | GCTGCATGGTGCAGGTGACCTGCGGCACCACCACCCTGAACGG | |
| | CCTGTGGCTGGACGACGTGGTGTACTGCCCCAGGCACGTGATC | |
| | TGCACCAGCGAGGACATGCTGAACCCCAACTACGAGGACCTGCT | |
| | GATCAGGAAGAGCAACCACAACTTCCTGGTGCAGGCCGGCAAC | |
| | GTGCAGCTGAGGGTGATCGGCCACAGCATGCAGAACTGCGTGC | |
| | TGAAGCTGAAGGTGGACACCGCCAACCCCAAGACCCCCAAGTA | |
| | CAAGTTCGTGAGGATCCAGCCCGGCCAGACCTTCAGCGTGCTG | |
| | GCCTGCTACAACGGCAGCCCCAGCGGCGTGTACCAGTGCGCCA | |
| | TGAGGCCCAACTTCACCATCAAGGGCAGCTTCCTGAACGGCAGC | |
| | TGCGGCAGCGTGGGCTTCAACATCGACTACGACTGCGTGAGCTT | |
| | CTGCTACATGCACCACATGGAGCTGCCCACCGGCGTGCACGCC | |
| | GGCACCGACCTGGAGGGCAACTTCTACGGCCCCTTCGTGGACA | |
| | GGCAGACCGCCCAGGCCGCCGGCACCGACACCACCATCACCGT | |
| | GAACGTGCTGGCCTGGCTGTACGCCGCCGTGATCAACGGCGAC | |
| | AGGTGGTTCCTGAACAGGTTCACCACCACCCTGAACGACTTCAA | |
| | CCTGGTGGCCATGAAGTACAACTACGAGCCCCTGACCCAGGAC | |
| | CACGTGGACATCCTGGGCCCCCTGAGCGCCCAGACCGGCATCG | |
| | CCGTGCTGGACATGTGCGCCAGCCTGAAGGAGCTGCTGCAGAA | |
| | CGGCATGAACGGCAGGACCATCCTGGGCAGCGCCCTGCTGGAG | |
| | GACGAGTTCACCCCCTTCGACGTGGTGAGGCAGTGCAGCGGCG | |
| | TGACCTTCCAG | |
| NSP6 | AGCGCCGTGAAGAGGACCATCAAGGGCACCCACCACTGGCTGC | 351 |
| | TGCTGACCATCCTGACCAGCCTGCTGGTGCTGGTGCAGAGCAC | |
| | CCAGTGGAGCCTGTTCTTCTTCCTGTACGAGAACGCCTTCCTGC | |
| | CCTTCGCCATGGGCATCATCGCCATGAGCGCCTTCGCCATGATG | |
| | TTCGTGAAGCACAAGCACGCCTTCCTGTGCCTGTTCCTGCTGCC | |
| | CAGCCTGGCCACCGTGGCCTACTTCAACATGGTGTACATGCCCG | |
| | CCAGCTGGGTGATGAGGATCATGACCTGGCTGGACATGGTGGA | |
| | CACCAGCCTGAGCGGCTTCAAGCTGAAGGACTGCGTGATGTAC | |
| | GCCAGCGCCGTGGTGCTGCTGATCCTGATGACCGCCAGGACCG | |
| | TGTACGACGACGGCGCCAGGAGGGTGTGGACCCTGATGAACGT | |
| | GCTGACCCTGGTGTACAAGGTGTACTACGGCAACGCCCTGGAC | |
| | CAGGCCATCAGCATGTGGGCCCTGATCATCAGCGTGACCAGCAA | |
| | CTACAGCGGCGTGGTGACCACCGTGATGTTCCTGGCCAGGGGC | |
| | ATCGTGTTCATGTGCGTGGAGTACTGCCCCATCTTCTTCATCACC | |
| | GGCAACACCCTGCAGTGCATCATGCTGGTGTACTGCTTCCTGGG | |
| | CTACTTCTGCACCTGCTACTTCGGCCTGTTCTGCCTGCTGAACA | |
| | GGTACTTCAGGCTGACCCTGGGCGTGTACGACTACCTGGTGAG | |
| | CACCCAGGAGTTCAGGTACATGAACAGCCAGGGCCTGCTGCCC | |
| | CCCAAGAACAGCATCGACGCCTTCAAGCTGAACATCAAGCTGCT | |
| | GGGCGTGGGCGGCAAGCCCTGCATCAAGGTGGCCACCGTGCA | |
| | G | |
| NSP7 | AGCAAGATGAGCGACGTGAAGTGCACCAGCGTGGTGCTGCTGA | 352 |
| | GCGTGCTGCAGCAGCTGAGGGTGGAGAGCAGCAGCAAGCTGTG | |
| | GGCCCAGTGCGTGCAGCTGCACAACGACATCCTGCTGGCCAAG | |
| | GACACCACCGAGGCCTTCGAGAAGATGGTGAGCCTGCTGAGCG | |
| | TGCTGCTGAGCATGCAGGGCGCCGTGGACATCAACAAGCTGTG | |
| | CGAGGAGATGCTGGACAACAGGGCCACCCTGCAG | |
| NSP8 | GCCATCGCCAGCGAGTTCAGCAGCCTGCCCAGCTACGCCGCCT | 353 |
| | TCGCCACCGCCCAGGAGGCCTACGAGCAGGCCGTGGCCAACG | |
| | GCGACAGCGAGGTGGTGCTGAAGAAGCTGAAGAAGAGCCTGAA | |
| | CGTGGCCAAGAGCGAGTTCGACAGGGACGCCGCCATGCAGAGG | |
| | AAGCTGGAGAAGATGGCCGACCAGGCCATGACCCAGATGTACA | |
| | AGCAGGCCAGGAGCGAGGACAAGAGGGCCAAGGTGACCAGCG | |
| | CCATGCAGACCATGCTGTTCACCATGCTGAGGAAGCTGGACAAC | |
| | GACGCCCTGAACAACATCATCAACAACGCCAGGGACGGCTGCG | |
| | TGCCCCTGAACATCATCCCCCTGACCACCGCCGCCAAGCTGATG | |
| | GTGGTGATCCCCGACTACAACACCTACAAGAACACCTGCGACGG | |
| | CACCACCTTCACCTACGCCAGCGCCCTGTGGGAGATCCAGCAG | |
| | GTGGTGGACGCCGACAGCAAGATCGTGCAGCTGAGCGAGATCA | |
| | GCATGGACAACAGCCCCAACCTGGCCTGGCCCCTGATCGTGAC | |
| | CGCCCTGAGGGCCAACAGCGCCGTGAAGCTGCA | |
| NSP9 | AACAACGAGCTGAGCCCCGTGGCCCTGAGGCAGATGAGCTGCG | 354 |
| | CCGCCGGCACCACCCAGACCGCCTGCACCGACGACAACGCCCT | |
| | GGCCTACTACAACACCACCAAGGGCGGCAGGTTCGTGCTGGCC | |
| | CTGCTGAGCGACCTGCAGGACCTGAAGTGGGCCAGGTTCCCCA | |
| | AGAGCGACGGCACCGGCACCATCTACACCGAGCTGGAGCCCCC | |
| | CTGCAGGTTCGTGACCGACACCCCCAAGGGCCCCAAGGTGAAG | |
| | TACCTGTACTTCATCAAGGGCCTGAACAACCTGAACAGGGGCAT | |
| | GGTGCTGGGCAGCCTGGCCGCCACCGTGAGGCTGCAG | |
| NSP10 | GCCGGCAACGCCACCGAGGTGCCCGCCAACAGCACCGTGCTGA | 355 |
| | GCTTCTGCGCCTTCGCCGTGGACGCCGCCAAGGCCTACAAGGA | |
| | CTACCTGGCCAGCGGCGGCCAGCCCATCACCAACTGCGTGAAG | |
| | ATGCTGTGCACCCACACCGGCACCGGCCAGGCCATCACCGTGA | |
| | CCCCCGAGGCCAACATGGACCAGGAGAGCTTCGGCGGCGCCAG | |
| | CTGCTGCCTGTACTGCAGGTGCCACATCGACCACCCCAACCCCA | |
| | AGGGCTTCTGCGACCTGAAGGGCAAGTACGTGCAGATCCCCAC | |
| | CACCTGCGCCAACGACCCCGTGGGCTTCACCCTGAAGAACACC | |
| | GTGTGCACCGTGTGCGGCATGTGGAAGGGCTACGGCTGCAGCT | |
| | GCGACCAGCTGAGGGAGCCCATGCTGCAG | |
| Nsp | AGCGCCGACGCCCAGAGCTTCCTGAACAGGGTGTGCGGCGTGA | 159 |
| | GCGCCGCCAGGCTGACCCCCTGCGGCACCGGCACCAGCACCG | |
| | ACGTGGTGTACAGGGCCTTCGACATCTACAACGACAAGGTGGCC | |
| | GGCTTCGCCAAGTTCCTGAAGACCAACTGCTGCAGGTTCCAGGA | |
| | GAAGGACGAGGACGACAACCTGATCGACAGCTACTTCGTGGTGA | |
| | AGAGGCACACCTTCAGCAACTACCAGCACGAGGAGACCATCTAC | |
| | AACCTGCTGAAGGACTGCCCCGCCGTGGCCAAGCACGACTTCTT | |
| | CAAGTTCAGGATCGACGGCGACATGGTGCCCCACATCAGCAGG | |
| | CAGAGGCTGACCAAGTACACCATGGCCGACCTGGTGTACGCCC | |
| | TGAGGCACTTCGACGAGGGCAACTGCGACACCCTGAAGGAGAT | |
| | CCTGGTGACCTACAACTGCTGCGACGACGACTACTTCAACAAGA | |
| | AGGACTGGTACGACTTCGTGGAGAACCCCGACATCCTGAGGGT | |
| | GTACGCCAACCTGGGCGAGAGGGTGAGGCAGGCCCTGCTGAAG | |
| | ACCGTGCAGTTCTGCGACGCCATGAGGAACGCCGGCATCGTGG | |
| | GCGTGCTGACCCTGGACAACCAGGACCTGAACGGCAACTGGTA | |
| | CGACTTCGGCGACTTCATCCAGACCACCCCCGGCAGCGGCGTG | |
| | CCCGTGGTGGACAGCTACTACAGCCTGCTGATGCCCATCCTGAC | |
| | CCTGACCAGGGCCCTGACCGCCGAGAGCCACGTGGACACCGAC | |
| | CTGACCAAGCCCTACATCAAGTGGGACCTGCTGAAGTACGACTT | |
| | CACCGAGGAGAGGCTGAAGCTGTTCGACAGGTACTTCAAGTACT | |
| | GGGACCAGACCTACCACCCCAACTGCGTGAACTGCCTGGACGA | |
| | CAGGTGCATCCTGCACTGCGCCAACTTCAACGTGCTGTTCAGCA | |
| | CCGTGTTCCCCCCCACCAGCTTCGGCCCCCTGGTGAGGAAGAT | |
| | CTTCGTGGACGGCGTGCCCTTCGTGGTGAGCACCGGCTACCAC | |
| | TTCAGGGAGCTGGGCGTGGTGCACAACCAGGACGTGAACCTGC | |
| | ACAGCAGCAGGCTGAGCTTCAAGGAGCTGCTGGTGTACGCCGC | |
| | CGACCCCGCCATGCACGCCGCCAGCGGCAACCTGCTGCTGGAC | |
| | AAGAGGACCACCTGCTTCAGCGTGGCCGCCCTGACCAACAACG | |
| | TGGCCTTCCAGACCGTGAAGCCCGGCAACTTCAACAAGGACTTC | |
| | TACGACTTCGCCGTGAGCAAGGGCTTCTTCAAGGAGGGCAGCA | |
| | GCGTGGAGCTGAAGCACTTCTTCTTCGCCCAGGACGGCAACGC | |
| | CGCCATCAGCGACTACGACTACTACAGGTACAACCTGCCCACCA | |
| | TGTGCGACATCAGGCAGCTGCTGTTCGTGGTGGAGGTGGTGGA | |
| | CAAGTACTTCGACTGCTACGACGGCGGCTGCATCAACGCCAACC | |
| | AGGTGATCGTGAACAACCTGGACAAGAGCGCCGGCTTCCCCTTC | |
| | AACAAGTGGGGCAAGGCCAGGCTGTACTACGACAGCATGAGCT | |
| | ACGAGGACCAGGACGCCCTGTTCGCCTACACCAAGAGGAACGT | |
| | GATCCCCACCATCACCCAGATGAACCTGAAGTACGCCATCAGCG | |
| | CCAAGAACAGGGCCAGGACCGTGGCCGGCGTGAGCATCTGCAG | |
| | CACCATGACCAACAGGCAGTTCCACCAGAAGCTGCTGAAGAGCA | |
| | TCGCCGCCACCAGGGGCGCCACCGTGGTGATCGGCACCAGCAA | |
| | GTTCTACGGCGGCTGGCACAACATGCTGAAGACCGTGTACAGC | |
| | GACGTGGAGAACCCCCACCTGATGGGCTGGGACTACCCCAAGT | |
| | GCGACAGGGCCATGCCCAACATGCTGAGGATCATGGCCAGCCT | |
| | GGTGCTGGCCAGGAAGCACACCACCTGCTGCAGCCTGAGCCAC | |
| | AGGTTCTACAGGCTGGCCAACGAGTGCGCCCAGGTGCTGAGCG | |
| | AGATGGTGATGTGCGGCGGCAGCCTGTACGTGAAGCCCGGCGG | |
| | CACCAGCAGCGGCGACGCCACCACCGCCTACGCCAACAGCGTG | |
| | TTCAACATCTGCCAGGCCGTGACCGCCAACGTGAACGCCCTGCT | |
| | GAGCACCGACGGCAACAAGATCGCCGACAAGTACGTGAGGAAC | |
| | CTGCAGCACAGGCTGTACGAGTGCCTGTACAGGAACAGGGACG | |
| | TGGACACCGACTTCGTGAACGAGTTCTACGCCTACCTGAGGAAG | |
| | CACTTCAGCATGATGATCCTGAGCGACGACGCCGTGGTGTGCTT | |
| | CAACAGCACCTACGCCAGCCAGGGCCTGGTGGCCAGCATCAAG | |
| | AACTTCAAGAGCGTGCTGTACTACCAGAACAACGTGTTCATGAG | |
| | CGAGGCCAAGTGCTGGACCGAGACCGACCTGACCAAGGGCCCC | |
| | CACGAGTTCTGCAGCCAGCACACCATGCTGGTGAAGCAGGGCG | |
| | ACGACTACGTGTACCTGCCCTACCCCGACCCCAGCAGGATCCTG | |
| | GGCGCCGGCTGCTTCGTGGACGACATCGTGAAGACCGACGGCA | |
| | CCCTGATGATCGAGAGGTTCGTGAGCCTGGCCATCGACGCCTAC | |
| | CCCCTGACCAAGCACCCCAACCAGGAGTACGCCGACGTGTTCC | |
| | ACCTGTACCTGCAGTACATCAGGAAGCTGCACGACGAGCTGACC | |
| | GGCCACATGCTGGACATGTACAGCGTGATGCTGACCAACGACAA | |
| | CACCAGCAGGTACTGGGAGCCCGAGTTCTACGAGGCCATGTAC | |
| | ACCCCCCACACCGTGCTGCAG | |
| NSP13 | GCCGTGGGCGCCTGCGTGCTGTGCAACAGCCAGACCAGCCTGA | 356 |
| | GGTGCGGCGCCTGCATCAGGAGGCCCTTCCTGTGCTGCAAGTG | |
| | CTGCTACGACCACGTGATCAGCACCAGCCACAAGCTGGTGCTGA | |
| | GCGTGAACCCCTACGTGTGCAACGCCCCCGGCTGCGACGTGAC | |
| | CGACGTGACCCAGCTGTACCTGGGCGGCATGAGCTACTACTGC | |
| | AAGAGCCACAAGCCCCCCATCAGCTTCCCCCTGTGCGCCAACG | |
| | GCCAGGTGTTCGGCCTGTACAAGAACACCTGCGTGGGCAGCGA | |
| | CAACGTGACCGACTTCAACGCCATCGCCACCTGCGACTGGACCA | |
| | ACGCCGGCGACTACATCCTGGCCAACACCTGCACCGAGAGGCT | |
| | GAAGCTGTTCGCCGCCGAGACCCTGAAGGCCACCGAGGAGACC | |
| | TTCAAGCTGAGCTACGGCATCGCCACCGTGAGGGAGGTGCTGA | |
| | GCGACAGGGAGCTGCACCTGAGCTGGGAGGTGGGCAAGCCCA | |
| | GGCCCCCCCTGAACAGGAACTACGTGTTCACCGGCTACAGGGT | |
| | GACCAAGAACAGCAAGGTGCAGATCGGCGAGTACACCTTCGAG | |
| | AAGGGCGACTACGGCGACGCCGTGGTGTACAGGGGCACCACCA | |
| | CCTACAAGCTGAACGTGGGCGACTACTTCGTGCTGACCAGCCAC | |
| | ACCGTGATGCCCCTGAGCGCCCCCACCCTGGTGCCCCAGGAGC | |
| | ACTACGTGAGGATCACCGGCCTGTACCCCACCCTGAACATCAGC | |
| | GACGAGTTCAGCAGCAACGTGGCCAACTACCAGAAGGTGGGCA | |
| | TGCAGAAGTACAGCACCCTGCAGGGCCCCCCCGGCACCGGCAA | |
| | GAGCCACTTCGCCATCGGCCTGGCCCTGTACTACCCCAGCGCC | |
| | AGGATCGTGTACACCGCCTGCAGCCACGCCGCCGTGGACGCCC | |
| | TGTGCGAGAAGGCCCTGAAGTACCTGCCCATCGACAAGTGCAG | |
| | CAGGATCATCCCCGCCAGGGCCAGGGTGGAGTGCTTCGACAAG | |
| | TTCAAGGTGAACAGCACCCTGGAGCAGTACGTGTTCTGCACCGT | |
| | GAACGCCCTGCCCGAGACCACCGCCGACATCGTGGTGTTCGAC | |
| | GAGATCAGCATGGCCACCAACTACGACCTGAGCGTGGTGAACG | |
| | CCAGGCTGAGGGCCAAGCACTACGTGTACATCGGCGACCCCGC | |
| | CCAGCTGCCCGCCCCCAGGACCCTGCTGACCAAGGGCACCCTG | |
| | GAGCCCGAGTACTTCAACAGCGTGTGCAGGCTGATGAAGACCAT | |
| | CGGCCCCGACATGTTCCTGGGCACCTGCAGGAGGTGCCCCGCC | |
| | GAGATCGTGGACACCGTGAGCGCCCTGGTGTACGACAACAAGC | |
| | TGAAGGCCCACAAGGACAAGAGCGCCCAGTGCTTCAAGATGTTC | |
| | TACAAGGGCGTGATCACCCACGACGTGAGCAGCGCCATCAACA | |
| | GGCCCCAGATCGGCGTGGTGAGGGAGTTCCTGACCAGGAACCC | |
| | CGCCTGGAGGAAGGCCGTGTTCATCAGCCCCTACAACAGCCAG | |
| | AACGCCGTGGCCAGCAAGATCCTGGGCCTGCCCACCCAGACCG | |
| | TGGACAGCAGCCAGGGCAGCGAGTACGACTACGTGATCTTCAC | |
| | CCAGACCACCGAGACCGCCCACAGCTGCAACGTGAACAGGTTC | |
| | AACGTGGCCATCACCAGGGCCAAGGTGGGCATCCTGTGCATCAT | |
| | GAGCGACAGGGACCTGTACGACAAGCTGCAGTTCACCAGCCTG | |
| | GAGATCCCCAGGAGGAACGTGGCCACCCTGCAG | |
| NSP14 | GCCGAGAACGTGACCGGCCTGTTCAAGGACTGCAGCAAGGTGA | 357 |
| | TCACCGGCCTGCACCCCACCCAGGCCCCCACCCACCTGAGCGT | |
| | GGACACCAAGTTCAAGACCGAGGGCCTGTGCGTGGACATCCCC | |
| | GGCATCCCCAAGGACATGACCTACAGGAGGCTGATCAGCATGAT | |
| | GGGCTTCAAGATGAACTACCAGGTGAACGGCTACCCCAACATGT | |
| | TCATCACCAGGGAGGAGGCCATCAGGCACGTGAGGGCCTGGAT | |
| | CGGCTTCGACGTGGAGGGCTGCCACGCCACCAGGGAGGCCGT | |
| | GGGCACCAACCTGCCCCTGCAGCTGGGCTTCAGCACCGGCGTG | |
| | AACCTGGTGGCCGTGCCCACCGGCTACGTGGACACCCCCAACA | |
| | ACACCGACTTCAGCAGGGTGAGCGCCAAGCCCCCCCCCGGCGA | |
| | CCAGTTCAAGCACCTGATCCCCCTGATGTACAAGGGCCTGCCCT | |
| | GGAACGTGGTGAGGATCAAGATCGTGCAGATGCTGAGCGACAC | |
| | CCTGAAGAACCTGAGCGACAGGGTGGTGTTCGTGCTGTGGGCC | |
| | CACGGCTTCGAGCTGACCAGCATGAAGTACTTCGTGAAGATCGG | |
| | CCCCGAGAGGACCTGCTGCCTGTGCGACAGGAGGGCCACCTGC | |
| | TTCAGCACCGCCAGCGACACCTACGCCTGCTGGCACCACAGCAT | |
| | CGGCTTCGACTACGTGTACAACCCCTTCATGATCGACGTGCAGC | |
| | AGTGGGGCTTCACCGGCAACCTGCAGAGCAACCACGACCTGTA | |
| | CTGCCAGGTGCACGGCAACGCCCACGTGGCCAGCTGCGACGCC | |
| | ATCATGACCAGGTGCCTGGCCGTGCACGAGTGCTTCGTGAAGA | |
| | GGGTGGACTGGACCATCGAGTACCCCATCATCGGCGACGAGCT | |
| | GAAGATCAACGCCGCCTGCAGGAAGGTGCAGCACATGGTGGTG | |
| | AAGGCCGCCCTGCTGGCCGACAAGTTCCCCGTGCTGCACGACA | |
| | TCGGCAACCCCAAGGCCATCAAGTGCGTGCCCCAGGCCGACGT | |
| | GGAGTGGAAGTTCTACGACGCCCAGCCCTGCAGCGACAAGGCC | |
| | TACAAGATCGAGGAGCTGTTCTACAGCTACGCCACCCACAGCGA | |
| | CAAGTTCACCGACGGCGTGTGCCTGTTCTGGAACTGCAACGTGG | |
| | ACAGGTACCCCGCCAACAGCATCGTGTGCAGGTTCGACACCAG | |
| | GGTGCTGAGCAACCTGAACCTGCCCGGCTGCGACGGCGGCAGC | |
| | CTGTACGTGAACAAGCACGCCTTCCACACCCCCGCCTTCGACAA | |
| | GAGCGCCTTCGTGAACCTGAAGCAGCTGCCCTTCTTCTACTACA | |
| | GCGACAGCCCCTGCGAGAGCCACGGCAAGCAGGTGGTGAGCG | |
| | ACATCGACTACGTGCCCCTGAAGAGCGCCACCTGCATCACCAGG | |
| | TGCAACCTGGGCGGCGCCGTGTGCAGGCACCACGCCAACGAGT | |
| | ACAGGCTGTACCTGGACGCCTACAACATGATGATCAGCGCCGGC | |
| | TTCAGCCTGTGGGTGTACAAGCAGTTCGACACCTACAACCTGTG | |
| | GAACACCTTCACCAGGCTGCAG | |
| NSP15 | AGCCTGGAGAACGTGGCCTTCAACGTGGTGAACAAGGGCCACTT | 358 |
| | CGACGGCCAGCAGGGCGAGGTGCCCGTGAGCATCATCAACAAC | |
| | ACCGTGTACACCAAGGTGGACGGCGTGGACGTGGAGCTGTTCG | |
| | AGAACAAGACCACCCTGCCCGTGAACGTGGCCTTCGAGCTGTG | |
| | GGCCAAGAGGAACATCAAGCCCGTGCCCGAGGTGAAGATCCTG | |
| | AACAACCTGGGCGTGGACATCGCCGCCAACACCGTGATCTGGG | |
| | ACTACAAGAGGGACGCCCCCGCCCACATCAGCACCATCGGCGT | |
| | GTGCAGCATGACCGACATCGCCAAGAAGCCCACCGAGACCATCT | |
| | GCGCCCCCCTGACCGTGTTCTTCGACGGCAGGGTGGACGGCCA | |
| | GGTGGACCTGTTCAGGAACGCCAGGAACGGCGTGCTGATCACC | |
| | GAGGGCAGCGTGAAGGGCCTGCAGCCCAGCGTGGGCCCCAAG | |
| | CAGGCCAGCCTGAACGGCGTGACCCTGATCGGCGAGGCCGTGA | |
| | AGACCCAGTTCAACTACTACAAGAAGGTGGACGGCGTGGTGCAG | |
| | CAGCTGCCCGAGACCTACTTCACCCAGAGCAGGAACCTGCAGG | |
| | AGTTCAAGCCCAGGAGCCAGATGGAGATCGACTTCCTGGAGCTG | |
| | GCCATGGACGAGTTCATCGAGAGGTACAAGCTGGAGGGCTACG | |
| | CCTTCGAGCACATCGTGTACGGCGACTTCAGCCACAGCCAGCTG | |
| | GGCGGCCTGCACCTGCTGATCGGCCTGGCCAAGAGGTTCAAGG | |
| | AGAGCCCCTTCGAGCTGGAGGACTTCATCCCCATGGACAGCACC | |
| | GTGAAGAACTACTTCATCACCGACGCCCAGACCGGCAGCAGCAA | |
| | GTGCGTGTGCAGCGTGATCGACCTGCTGCTGGACGACTTCGTG | |
| | GAGATCATCAAGAGCCAGGACCTGAGCGTGGTGAGCAAGGTGG | |
| | TGAAGGTGACCATCGACTACACCGAGATCAGCTTCATGCTGTGG | |
| | TGCAAGGACGGCCACGTGGAGACCTTCTACCCCAAGCTGCAG | |
| NSP16 | AGCAGCCAGGCCTGGCAGCCCGGCGTGGCCATGCCCAACCTGT | 359 |
| | ACAAGATGCAGAGGATGCTGCTGGAGAAGTGCGACCTGCAGAA | |
| | CTACGGCGACAGCGCCACCCTGCCCAAGGGCATCATGATGAAC | |
| | GTGGCCAAGTACACCCAGCTGTGCCAGTACCTGAACACCCTGAC | |
| | CCTGGCCGTGCCCTACAACATGAGGGTGATCCACTTCGGCGCC | |
| | GGCAGCGACAAGGGCGTGGCCCCCGGCACCGCCGTGCTGAGG | |
| | CAGTGGCTGCCCACCGGCACCCTGCTGGTGGACAGCGACCTGA | |
| | ACGACTTCGTGAGCGACGCCGACAGCACCCTGATCGGCGACTG | |
| | CGCCACCGTGCACACCGCCAACAAGTGGGACCTGATCATCAGC | |
| | GACATGTACGACCCCAAGACCAAGAACGTGACCAAGGAGAACGA | |
| | CAGCAAGGAGGGCTTCTTCACCTACATCTGCGGCTTCATCCAGC | |
| | AGAAGCTGGCCCTGGGCGGCAGCGTGGCCATCAAGATCACCGA | |
| | GCACAGCTGGAACGCCGACCTGTACAAGCTGATGGGCCACTTC | |
| | GCCTGGTGGACCGCCTTCGTGACCAACGTGAACGCCAGCAGCA | |
| | GCGAGGCCTTCCTGATCGGCTGCAACTACCTGGGCAAGCCCAG | |
| | GGAGCAGATCGACGGCTACGTGATGCACGCCAACTACATCTTCT | |
| | GGAGGAACACCAACCCCATCCAGCTGAGCAGCTACAGCCTGTTC | |
| | GACATGAGCAAGTTCCCCCTGAAGCTGAGGGGCACCGCCGTGA | |
| | TGAGCCTGAAGGAGGGCCAGATCAACGACATGATCCTGAGCCT | |
| | GCTGAGCAAGGGCAGGCTGATCATCAGGGAGAACAACAGGGTG | |
| | GTGATCAGCAGCGACGTGCTGGTGAACAAC | |

[0304] The vaccine compositions described herein protects against disease caused by one or more coronavirus variants or coronavirus subvariants. In some embodiments, the coronavirus variants or coronavirus subvariants comprise past or Currently circulating coronavirus variants or coronavirus subvariants including but not limited to alpha, beta, gamma, delta, and omicron. In other embodiments, the coronavirus variants or coronavirus subvariants comprise future variants or future subvariants of human and animal coronavirus.

[0305] The vaccine compositions described herein may also protect against infection and reinfection of coronavirus variants or coronavirus subvariants. In some embodiments, the coronavirus variants or coronavirus subvariants comprise past or currently circulating coronavirus variants or coronavirus subvariants including but not limited to alpha, beta, gamma, delta, and omicron. In other embodiments, the coronavirus variants or coronavirus subvariants comprise future variants or future Subvariants of human and animal coronavirus.

[0306] The vaccine compositions described herein protects against infection or reinfection of one or more coronavirus variant or coronavirus subvariant. In some embodiments, the vaccine composition described herein against infection or reinfection of multiple coronavirus variants or coronavirus subvariants. In other embodiments, the vaccine composition described herein composition protects against infection or re-infection caused by one coronavirus variants or coronavirus subvariants.

[0307] In some embodiments, the vaccine composition induces strong and long-lasting protection mediated by antibodies (Abs), CD4+ T helper (Th1) cells, and/or CD8+ cytotoxic T-cells (CTL).

[0308] Molecular Adjuvants and T Cell Enhancements

[0309] In certain embodiments, the vaccine composition comprises a molecular adjuvant and/or one or more T Cell enhancement compositions. The adjuvant and/or enhancement compositions may help improve the immunogenicity and/or long-term memory of the vaccine composition. Non-limiting examples of molecular adjuvants include CpG, such as a CpG polymer, and flagellin,

[0310] In some embodiments, the vaccine composition comprises a T cell attracting chemokine. The T cell attracting chemokine helps pull the T cells from the circulation to the appropriate tissues, e.g., the lungs, heart, kidney, and brain. Non-limiting examples of T cell attracting chemokines include CCL5, CXCL9, CXCL10, CXCL11, CCL25, CCL28, CXCL14, CXCL17, or a combination thereof.

[0311] In some embodiments, the vaccine composition comprises a composition that promotes T cell proliferation. Non-limiting examples of compositions that promote T cell proliferation include IL-7, IL-15, IL-2, or a combination thereof.

[0312] In some embodiments, the vaccine composition comprises a composition that promotes T cell homing in the lungs. Non-limiting examples of compositions that promote T cell homing include CCL25, CCL28, CXCL14, CXCL17 or a combination thereof.

[0313] In certain embodiments, the molecular adjuvant and/or the T cell attracting chemokine and/or the composition that promotes T cell proliferation are delivered with a separate antigen delivery system from the large sequences.

[0314] Table 11 shows non-limiting examples of T-cell enhancements that may be used to create a vaccine composition described herein.

TABLE 11

| T-cell | | SEQ ID |
|---|---|---|
| enhancement | Sequence | NO: |
| CXCL11 | ATGAACAGGAAGGTGACCGCCATCGCCCTGGCCGCCATCATCTGG | 160 |
| | GCCACCGCCGCCCAGGGCTTCCTGATGTTCAAGCAGGGCAGGTGC | |
| | CTGTGCATCGGCCCCGGCATGAAGGCCGTGAAGATGGCCGAGATC | |
| | GAGAAGGCCAGCGTGATCTACCCCAGCAACGGCTGCGACAAGGTG | |
| | GAGGTGATCGTGACCATGAAGGCCCACAAGAGGCAGAGGTGCCTG | |
| | GACCCCAGGAGCAAGCAGGCCAGGCTGATCATGCAGGCCATCGAG | |
| | AAGAAGAACTTCCTGAGGAGGCAGAACATGTGA | |
| CCL5 | ATGAAGGTCTCCGCGGCAGCCCTCGCTGTCATCCTCATTGCTACTG | 161 |
| | CCCTCTGCGCTCCTGCATCTGCCTCCCCATATTCCTCGGACACCAC | |
| | ACCCTGCTGCTTTGCCTACATTGCCCGCCCACTGCCCCGTGCCCAC | |
| | ATCAAGGAGTATTTCTACACCAGTGGCAAGTGCTCCAACCCAGCAG | |
| | TCGTCCACAGGTCAAGGATGCCAAAGAGAGAGGGACAGCAAGTCTG | |
| | GCAGGATTTCCTGTATGACTCCCGGCTGAACAAGGGCAAGCTTTGT | |
| | CACCCGAAAGAACCGCCAAGTGTGTGCCAACCCAGAGAAGAAATGG | |
| | GTTCGGGAGTACATCAACTCTTTGGAGATGAGCTAGGATGGAGAGT | |
| | CCTTGAACCTGAACTTACACAAATTTGCCTGTTTCTGCTTGCTCTTGT | |
| | CCTAGCTTGGGAGGCTTCCCCTCACTATCCTACCCCACCCGCTCCT | |
| | TGA | |
| CXCL9 | ATGAAGAAAAGTGGTGTTCTTTTCCTCTTGGGCATCATCTTGCTGGT | 162 |
| | TCTGATTGGAGTGCAAGGAACCCCAGTAGTGAGAAAGGGTCGCTGT | |
| | TCCTGCATCAGCACCAACCAAGGGACTATCCACCTACAATCCTTGAA | |
| | AGACCTTAAACAATTTGCCCCAAGCCCTTCCTGCGAGAAAATTGAAA | |
| | TCATTGCTACACTGAAGAATGGAGTTCAAACATGTCTAAACCCAGAT | |
| | TCAGCAGATGTGAAGGAACTGATTAAAAAGTGGGAGAAACAGGTCA | |
| | GCCAAAAGAAAAAGCAAAAGAATGGGAAAAAACATGAAAAAAAGAAA | |
| | GTTCTGAAAGTTCGAAAATCTCAACGTTCTCGTCAAAAGAAGACTAC | |
| | ATAA | |
| CXCL10 | ATGAATCAAACTGCCATTCTGATTTGCTGCCTTATCTTTCTGACTCTA | 163 |
| | AGTGGCATTCAAGGAGTACCTCTCTCTAGAACTGTACGCTGTACCTG | |
| | CATCAGCATTAGTAATCAACCTGTTAATCCAAGGTCTTTAGAAAAACT | |
| | TGAAATTATTCCTGCAAGCCAATTTTGTCCACGTGTTGAGATCATTG | |
| | CTACAATGAAAAAGAAGGGTGAGAAGAGATGTCTGAATCCAGAATC | |
| | GAAGGCCATCAAGAATTTACTGAAAGCAGTTAGCAAGGAAAGGTCTA | |
| | AAAGATCTCCTTAA | |
| CXCL14 | ATGAGGCTCCTGGCGGCCGCGCTGCTCCTGCTGCTGCTGGCGCTG | 164 |
| | TACACCGCGCGTGTGGACGGGTCCAAATGCAAGTGCTCCCGGAAG | |
| | GGACCCAAGATCCGCTACAGCGACGTGAAGAAGCTGGAAATGAAGC | |
| | CAAAGTACCCGCACTGCGAGGAGAAGATGGTTATCATCACCACCAA | |
| | GAGCGTGTCCAGGTACCGAGGTCAGGAGCACTGCCTGCACCCCAA | |
| | GCTGCAGAGCACCAAGCGCTTCATCAAGTGGTACAACGCCTGGAAC | |
| | GAGAAGCGCAGGGTCTACGAAGAATAG | |
| CXCL17 | ATGAAAGTTCTAATCTCTTCCCTCCTCCTGTTGCTGCCACTAATGCT | 165 |
| | GATGTCCATGGTCTCTAGCAGCCTGAATCCAGGGGTCGCCAGAGGC | |
| | CACAGGGACCGAGGCCAGGCTTCTAGGAGATGGCTCCAGGAAGGC | |
| | GGCCAAGAATGTGAGTGCAAAGATTGGTTCCTGAGAGCCCCGAGAA | |
| | GAAAATTCATGACAGTGTCTGGGCTGCCAAAGAAGCAGTGCCCCTG | |
| | TGATCATTTCAAGGGCAATGTGAAGAAAACAAGACACCAAAGGCAC | |
| | CACAGAAAGCCAAACAAGCATTCCAGAGCCTGCCAGCAATTTCTCAA | |
| | ACAATGTCAGCTAAGAAGCTTTGCTCTGCCTTTGTAG | |
| CCL25 | ATGAACCTGTGGCTCCTGGCCTGCCTGGTGGCCGGCTTCCTGGGA | 166 |
| | GCCTGGGCCCCCGCTGTCCACACCCAAGGTGTCTTTGAGGACTGCT | |
| | GCCTGGCCTACCACTACCCCATTGGGTGGGCTGTGCTCCGGCGCG | |
| | CCTGGACTTACCGGATCCAGGAGGTGAGCGGGAGCTGCAATCTGC | |
| | CTGCTGCGATATTCTACCTCCCCAAGAGACACAGGAAGGTGTGTGG | |
| | GAACCCCAAAAGCAGGGAGGTGCAGAGAGCCATGAAGCTCCTGGA | |
| | TGCTCGAAATAAGGTTTTTGCAAAGCTCCACCACAACACGCAGACCT | |
| | TCCAAGCAGGCCCTCATGCTGTAAAGAAGTTGAGTTCTGGAAACTC | |
| | CAAGTTATCATCGTCCAAGTTTAGCAATCCCATCAGCAGCAGTAAGA | |
| | GGAATGTCTCCCTCCTGATATCAGCTAATTCAGGACTGTGA | |
| CCL28 | ATGCAGCAGAGAGGACTCGCCATCGTGGCCTTGGCTGTCTGTGCG | 167 |
| | GCCCTACATGCCTCAGAAGCCATACTTCCCATTGCCTCCAGCTGTTG | |
| | CACGGAGGTTTCACATCATATTTCCAGAAGGCTCCTGGAAAGAGTG | |
| | AATATGTGTCGCATCCAGAGAGCTGATGGGGATTGTGACTTGGCTG | |
| | CTGTCATCCTTCATGTCAAGCGCAGAAGAATCTGTGTCAGCCCGCA | |
| | CAACCATACTGTTAAGCAGTGGATGAAAGTGCAAGCTGCCAAGAAA | |
| | AATGGTAAAGGAAATGTTTGCCACAGGAAGAAACACCATGGCAAGA | |
| | GGAACAGTAACAGGGCACATCAGGGGAAACACGAAACATACGGCCA | |
| | TAAAACTCCTTATTAG | |
| IL-7 | ATGTTCCACGTGAGCTTCAGGTACATCTTCGGCATCCCCCCCCTGAT | 168 |
| | CCTGGTGCTGCTGCCCGTGACCAGCAGCGAGTGCCACATCAAGGA | |
| | CAAGGAGGGCAAGGCCTACGAGAGCGTGCTGATGATCAGCATCGA | |
| | CGAGCTGGACAAGATGACCGGCACCGACAGCAACTGCCCCAACAA | |
| | CGAGCCCAACTTCTTCAGGAAGCACGTGTGCGACGACACCAAGGAG | |
| | GCCGCCTTCCTGAACAGGGCCGCCAGGAAGCTGAAGCAGTTCCTG | |
| | AAGATGAACATCAGCGAGGAGTTCAACGTGCACCTGCTGACCGTGA | |
| | GCCAGGGCACCCAGACCCTGGTGAACTGCACCAGCAAGGAGGAGA | |
| | AGAACGTGAAGGAGCAGAAGAAGAACGACGCCTGCTTCCTGAAGAG | |
| | GCTGCTGAGGGAGATCAAGACCTGCTGGAACAAGATCCTGAAGGG | |
| | CAGCATCTGA | |
| IL-15 | ATGAGAATTTCGAAACCACATTTGAGAAGTATTTCCATCCAGTGCTA | 169 |
| | CTTGTGTTTACTTCTAAACAGTCATTTTCTAACTGAAGCTGGCATTCA | |
| | TGTCTTCATTTTGGGCTGTTTCAGTGCAGGGCTTCCTAAAACAGAAG | |
| | CCAACTGGGTGAATGTAATAAGTGATTTGAAAAAAATTGAAGATCTTA | |
| | TTCAATCTATGCATATTGATGCTACTTTATATACGGAAAGTGATGTTC | |
| | ACCCCAGTTGCAAAGTAACAGCAATGAAGTGCTTTCTCTTGGAGTTA | |
| | CAAGTTATTTCACTTGAGTCCGGAGATGCAAGTATTCATGATACAGT | |
| | AGAAAATCTGATCATCCTAGCAAACAACAGTTTGTCTTCTAATGGGA | |
| | ATGTAACAGAATCTGGATGCAAAGAATGTGAGGAACTGGAGGAAAA | |
| | AAATATTAAAGAATTTTTGCAGAGTTTTGTACATATTGTCCAAATGTT | |
| | CATCAACACTTCTTGA | |
| IL-2 | ATGTACAGGATGCAACTCCTGTCTTGCATTGCACTAAGTCTTGCACT | 170 |
| | TGTCACAAACAGTGCACGTACTTCAAGTTCTACAAAGAAAACACAGC | |
| | TACAACTGGAGCATTTACTGCTGGATTTACAGATGATTTTGAATGGA | |
| | ATTAATAATTACAAGAATCCCAAACTCACCAGGATGCTCACATTTAAG | |
| | TTTTACATGCCCAAGAAGGCCACAGAACTGAAACATCTTCAGTGTCT | |
| | AGAAGAAGAACTCAAACCTCTGGAGGAAGTGCTAAATTTAGCTCAAA | |
| | GCAAAAACTTTCACTTAAGACCCAGGGACTTAATCAGCAATATCAAC | |
| | GTAATAGTTCTGGAACTAAAGGGATCTGAAACAACATTCATGTGTGA | |
| | ATATGCTGATGAGACAGCAACCATTGTAGAATTTCTGAACAGATGGA | |
| | TTACCTTTGTCAAAGCATCATCTCAACACTGACTTGA | |

[0315] In preferred embodiments, the T-cell enhancement compositions described herein (e.g. CXCL9, CXCL10, IL-7, IL-2) may be integrated into a separate delivery system from the vaccine compositions. In some embodiments, the T-cell enhancement compositions described herein (e.g. CXCL9, CXCL1G, IL-7, IL-2) may be integrated into the same delivery system as the vaccine compositions.

[0316] In certain embodiments, the vaccine composition comprises a tag. For example, in some embodiments, the vaccine composition comprises a His tag. The present invention is not limited to a His tag and includes other tags such as those known to one of ordinary skill in the art, such as a fluorescent tag (e g. GFP, YFP, etc.), etc.

### Antigen Delivery System

[0317] The present invention also features vaccine compositions in the form of an antigen delivery system. Any appropriate antigen delivery system may be considered for delivery of the antigens described herein. The present invention is not limited to the antigen delivery systems described herein.

[0318] In certain embodiments, the antigen delivery system is for targeted delivery of the vaccine composition, e.g., for targeting to the tissues of the body where the virus replicates.

[0319] In certain embodiments, the antigen delivery system comprises adenoviruses such as but not limited to Ad5, Ad26, Ad35, etc., as well as carriers such as lipid nanoparticles, polymers, peptides, etc. In other embodiments, the antigen delivery system comprises a vesicular stomatitis virus (VSV) vector.

[0320] The present invention is not limited to adenovirus vector-based antigen delivery systems. In certain embodiments, the antigen delivery system comprises an adeno-associated virus vector-based antigen delivery system, such as but not limited to the adeno-associated virus vector type 9 (AAV9 serotype), AAV type 8 (AAV8 serotype), etc. In certain embodiments, the adeno-associated virus vectors used are tropic, e.g., tropic to lungs, brain, heart and kidney, e.g., the tissues of the body that express ACE2 receptors (FIG. 3A)). For example, AAV9 is known to be neurotropic, which would help the vaccine composition to be expressed in the brain.

[0321] In the antigen delivery system, the one or more large sequences are operatively linked to a promoter. In certain embodiments, the one or more large sequences are operatively linked to a generic promoter. For example, in certain embodiments, the one or more large sequences are operatively linked to a CMV promoter. In certain embodiments, the one or more large sequences are operatively linked to a CAG, EFIA, EFS, CBh, SFFV, MSCV, mPGK, hPGK, SV40, UBC, or another appropriate promoter.

[0322] In some embodiments, the one or more large sequences are operatively linked to a tissue-specific promoter (e.g., a lung-specific promoter). For example, the antigen may be operatively linked to a SpB promoter or a CD144 promoter.

[0323] As discussed, in certain embodiments, the vaccine composition comprises a molecular adjuvant. In certain embodiments, the molecular adjuvant is operatively linked to a generic promoter, e.g., as described above. In certain embodiments, the molecular adjuvant is operatively linked to a tissue-specific promoter, e.g., a lung-specific promoter, e.g., SpB or CD144.

[0324] As discussed, in certain embodiments, the vaccine composition comprises a T cell attracting chemokine. In certain embodiments, the T cell attracting chemokine is operatively linked to a generic promoter, e.g., as described above. In certain embodiments, the T cell attracting chemokine is operatively linked to a tissue-specific promoter; e.g.; a lung-specific promoter, e.g.; CpB or CD144,

[0325] As discussed, in certain embodiments, the vaccine composition comprises a composition for promoting T cell proliferation. In certain embodiments, the composition for promoting T cell proliferation is operatively linked to a generic promoter, e.g., as described above. In certain embodiments, the composition for promoting T cell proliferation is operatively linked to a tissue-specific promoter, e.g., a lung-specific promoter, e.g.; SpB or CD144.

[0326] Table 12 shows non-limiting examples of promoters that may be used to create a vaccine composition described herein.

TABLE 12

| | | SEQ ID |
|---|---|---|
| Promoter | Sequence | NO: |
| CAG | CTCGACATTGATTATTGACTAGTTATTAATAGTAATCAATTACGGGGTCAT | 171 |
| | TAGTTCATAGCCCATATATGGAGTTCCGCGTTACATAACTTACGGTAAAT | |
| | GGCCCGCCTGGCTGACCGCCCAACGACCCCCGCCCATTGACGTCAATA | |
| | ATGACGTATGTTCCCATAGTAACGCCAATAGGGACTTTCCATTGACGTCA | |
| | ATGGGTGGAGTATTTACGGTAAACTGCCCACTTGGCAGTACATCAAGTG | |
| | TATCATATGCCAAGTACGCCCCCTATTGACGTCAATGACGGTAAATGGC | |
| | CCGCCTGGCATTATGCCCAGTACATGACCTTATGGGACTTTCCTACTTG | |
| | GCAGTACATCTACGTATTAGTCATCGCTATTACCATGGTCGAGGTGAGC | |
| | CCCACGTTCTGCTTCACTCTCCCCATCTCCCCCCCCTCCCCACCCCCAA | |
| | TTTTGTATTTATTTATTTTTTAATTATTTTGTGCAGCGATGGGGGCGGGG | |
| | GGGGGGGGGGGGCGCGCGCCAGGCGGGGCGGGGCGGGGCGAGGGG | |
| | CGGGGCGGGGCGAGGCGGAGAGGTGCGGCGGCAGCCAATCAGAGCG | |
| | GCGCGCTCCGAAAGTTTCCTTTTATGGCGAGGCGGCGGCGGCGGCGG | |
| | CCCTATAAAAAGCGAAGCGCGCGGCGGGCGGGAGTCGCTGCGCGCTG | |
| | CCTTCGCCCCGTGCCCCGCTCCGCCGCCGCCTCGCGCCGCCCGCCCC | |
| | GGCTCTGACTGACCGCGTTACTCCCACAGGTGAGCGGGCGGGACGGC | |
| | CCTTCTCCTCCGGGCTGTAATTAGCGCTTGGTTTAATGACGGCTTGTTTC | |
| | TTTTCTGTGGCTGCGTGAAAGCCTTGAGGGGCTCCGGGAGGGCCCTTT | |
| | GTGCGGGGGGAGCGGCTCGGGGGGTGCGTGCGTGTGTGTGTGCGTGG | |
| | GGAGCGCCGCGTGCGGCTCCGCGCTGCCCGGCGGCTGTGAGCGCTGC | |
| | GGGCGCGGCGCGGGGCTTTGTGCGCTCCGCAGTGTGCGCGAGGGGAG | |
| | CGCGGCCGGGGGCGGTGCCCCGCGGTGCGGGGGGGGCTGCGAGGG | |
| | GAACAAAGGCTGCGTGCGGGGTGTGTGCGTGGGGGGGTGAGCAGGGG | |
| | GTGTGGGCGCGTCGGTCGGGCTGCAACCCCCCCTGCACCCCCCTCCC | |
| | CGAGTTGCTGAGCACGGCCCGGCTTCGGGTGCGGGGCTCCGTACGGG | |
| | GCGTGGCGCGGGGCTCGCCGTGCCGGGCGGGGGGTGGCGGCAGGTG | |
| | GGGGTGCCGGGCGGGGCGGGGCCGCCTCGGGCCGGGGAGGGCTCG | |
| | GGGGAGGGGCGCGGCGGCCCCCGGAGCGCCGGCGGCTGTCGAGGCG | |
| | CGGCGAGCCGCAGCCATTGCCTTTTATGGTAATCGTGCGAGAGGGCGC | |
| | AGGGACTTCCTTTGTCCCAAATCTGTGCGGAGCCGAAATCTGGGAGGC | |
| | GCCGCCGCACCCCCTCTAGCGGGCGCGGGGCGAAGCGGTGCGGCGC | |
| | CGGCAGGAAGGAAATGGGCGGGGAGGGCCTTCGTGCGTCGCCGCGCC | |
| | GCCGTCCCCTTCTCCCTCTCCAGCCTCGGGGCTGTCCGCGGGGGGAC | |
| | GGCTGCCTTCGGGGGGGACGGGGCAGGGCGGGGTTCGGCTTCTGGCG | |
| | TGTGACCGGCGGCTCTAGAGCCTCTGCTAACCATGTTCATGCCTTCTTC | |
| | TTTTTCCTACAGCTCCTGGGCAACGTGCTGGTTATTGTGCTGTCTCATCA | |
| | TTTGGCAAAGAATTG | |
| CMV | TAGTTATTAATAGTAATCAATTACGGGGTCATTAGTTCATAGCCCATATAT | 172 |
| | GGAGTTCCGCGTTACATAACTTACGGTAAATGGCCCGCCTGGCTGACCG | |
| | CCCAACGACCCCCGCCCATTGACGTCAATAATGACGTATGTTCCCATAG | |
| | TAACGCCAATAGGGACTTTCCATTGACGTCAATGGGTGGAGTATTTACG | |
| | GTAAACTGCCCACTTGGCAGTACATCAAGTGTATCATATGCCAAGTACG | |
| | CCCCCTATTGACGTCAATGACGGTAAATGGCCCGCCTGGCATTATGCCC | |
| | AGTACATGACCTTATGGGACTTTCCTACTTGGCAGTACATCTACGTATTA | |
| | GTCATCGCTATTACCATGGTGATGCGGTTTTGGCAGTACATCAATGGGC | |
| | GTGGATAGCGGTTTGACTCACGGGGATTTCCAAGTCTCCACCCCATTGA | |
| | CGTCAATGGGAGTTTGTTGGCACCAAAATCAACGGGACTTTCCAAAAT | |
| | GTCGTAACAACTCCGCCCCATTGACGCAAATGGGCGGTAGGCGTGTAC | |
| | GGTGGGAGGTCTATATAAGCAGAGCTGGTTTAGTGAACCGTCAGATC | |
| SP-B | GTATAGGGCTGTCTGGGAGCCACTCCAGGGCCACAGAAATCTTGTCTCT | 173 |
| | GACTCAGGGTATTTTGTTTTCTGTTTTGTGTAAATGCTCTTCTGACTAATG | |
| | CAAACCATGTGTCCATAGAACCAGAAGATTTTTCCAGGGGAAAAGGTAA | |
| | GGAGGTGGTGAGAGTGTCCTGGGTCTGCCCTTCCAGGGCTTGCCCTGG | |
| | GTTAAGAGCCAGGCAGGAAGCTCTCAAGAGCATTGCTCAAGAGTAGAG | |
| | GGGGCCTGGGAGGCCCAGGGAGGGGATGGGAGGGGAACACCCAGGC | |
| | TGCCCCCAACCAGATGCCCTCCACCCTCCTCAACCTCCCTCCCACGGC | |
| | CTGGAGAGGTGGGACCAGGTATGGAGGCTTGAGAGCCCCTGGTTGGAG | |
| | GAAGCCACAAGTCCAGGAACATGGGAGTCTGGGCAGGGGGCAAAGGA | |
| | GGCAGGAACAGGCCATCAGCCAGGACAGGTGGTAAGGCAGGCAGGAG | |
| | TGTTCCTGCTGGGAAAAGGTGGGATCAAGCACCTGGAGGGCTCTTCAG | |
| | AGCAAAGACAAACACTGAGGTCGCTGCCACTCCTACAGAGCCCCCACG | |
| | CCCCGCCCAGCTATAAGGGGCCATGCACCAAGCAGGGTACCCAGGCTG | |
| | CAGAGGTGCC | |
| CD144 | CATCCATGCCCATGGCCTCAGATGCCAGCCATAAGCTGTTGGGTTCCAA | 174 |
| | ACCTCGACTCCAGGCTGGACTCACCCCTGTCTCCCCCACCAGCCTGAC | |
| | ACCTCCACCTGGGTATCTAACGAGCATCTCAAACTCAACCTGCCTGAGA | |
| | CAGAGGAATCACTATCCCCTCCTCCTCCAAAAATATCCTTCCATCACACT | |
| | CCCCATCTTGTGCTCTGATTTACTAAACGGCCCTGGGCCCTCTCTTTCTC | |
| | AGGGTCTCTGCTTGCCCAGCTATATAATAAAACAAGTTTGGGACTTCCCA | |
| | ACCATTCACCCATGGAAAAACAGAAGCAACTCTTCAAAGGACAGATTCC | |
| | CAGGATCTGCCCTGGGAGATTCCAAATCAGTTGATCTGGGGTGAGCCCA | |
| | GTCCTCTGTAGTTTTTAGAAGCTCCTCCTATGTCTCTCCTGGTCAGCAGA | |
| | ATCTTGGCCCCTCCCTTCCCCCCAGCCTCTTGGTTCTTCTGGGCTCTGA | |
| | TCCAGCCTCAGCGTCACTGTCTTCCACGCCCCTCTTTGATTCTCGTTTAT | |
| | GTCAAAAGCCTTGTGAGGATGAGGCTGTGATTATCCCCATTTACAGAT | |
| | GAGGAAACTGTGGCTCCAGGATGACACAACTGGCCAGAGGTCACATCA | |
| | GAAGCAGAGCTGGGTCACTTGACTCCACCCAATATCCCTAAATGCAAAC | |
| | ATCCCCTACAGACCGAGGCTGGCACCTTAGAGCTGGAGTCCATGCCCG | |
| | CTCTGACCAGGAGAAGCCAACCTGGTCCTCCAGAGCCAAGAGCTTCTGT | |
| | CCCTTTCCCATCTCCTGAAGCCTCCCTGTCACCTTTAAAGTCCATTCCCA | |
| | CAAAGACATCATGGGATCACCACAGAAAATCAAGCTCTGGGGCTAGGCT | |
| | GACCCCAGCTAGATTTTTGGCTCTTTTATACCCCAGCTGGGTGGACAAG | |
| | CACCTTAAACCCGCTGAGCCTCAGCTTCCCGGGCTATAAAATGGGGGTG | |
| | ATGACACCTGCCTGTAGCATTCCAAGGAGGGTTAAATGTGATGCTGCAG | |
| | CCAAGGGTCCCCACAGCCAGGCTCTTTGCAGGTGCTGGGTTCAGAGTC | |
| | CCAGAGCTGAGGCCGGGAGTAGGGGTTCAAGTGGGGTGCCCCAGGCA | |
| | GGGTCCAGTGCCAGCCCTCTGTGGAGACAGCCATCCGGGGCCGAGGC | |
| | AGCCGCCCACCGCAGGGCCTGCCTATCTGCAGCCAGCCCAGCCCTCAC | |
| | AAAGGAACAATAACAGGAAACCATCCCAGGGGGAAGTGGGCCAGGGCC | |
| | AGCTGGAAAACCTGAAGGGGAGGCAGCCAGGCCTCCCTCGCCAGCGG | |
| | GGTGTGGCTCCCCTCCAAAGACGGTCGGCTGACAGGCTCCACAGAGCT | |
| | CCACTCACGCTCAGCCCTGGACGGACAGGCAGTCCAACGGAACAGAAA | |
| | CATCCCTCAGCCCACAGGCACGGTGAGTGGGGGCTCCCACACTCCCCT | |
| | CCACCCCAAACCCGCCACCCTGCGCCCAAGATGGGAGGGTCCTCAGCT | |
| | TCCCCATCTGTAGAATGGGCATCGTCCCACTCCCATGACAGAGAGGCTC | |
| | C | |
| wild type | ATGTTCGTGTTCCTGGTGCTGCTGCCCCTGGTGAGCAGC | 175 |
| native | | |
| leader | | |
| sequence | | |

[0327] In certain embodiments, the T cell attracting chemokine and the composition that promotes T cell proliferation are driven by the same promoter (e.g., the T cell attracting chemokine and the composition that promotes T cell proliferation are synthesized as a peptide). In certain embodiments, the T cell attracting chemokine and the composition that promotes T cell proliferation are driven by different promoters. In certain embodiments, the antigen, the T cell attracting chemokine, and the composition that promotes T cell proliferation are driven by the same promoter. In certain embodiments, the antigen, the T cell attracting chemokine, and the composition that promotes T cell proliferation are driven by the different promoters. In certain embodiments, the T cell attracting chemokine and the composition that promotes T cell proliferation are driven by the same promoter, and the one or more large sequences are driven by a different promoter.

[0328] In some embodiments, the antigen delivery system comprises one or more linkers between the T cell attracting chemokine and the composition that promotes T cell proliferation. In certain embodiments, linkers are used between one or more of the epitopes. The linkers may allow for cleavage of the separate molecules (e.g., chemokine). For example, in some embodiments, a linker is positioned between IL-7 (or IL-2) and CCL5, CXCL9, CXCL10, CXCL11, CCL25, CCL28, CXCL14, CXCL17, etc. In some embodiments, a linker is positioned between IL-15 and CCL5, CXCL9, CXCL10, CXCL11, CCL25, CCL28, CXCL14, CXCL17, etc. In some embodiments, a linker is positioned between the antigen or large sequence and another composition, e.g., IL-15. IL-7, CCL5, CXCL9, CXCL10. CXCL11, CCL25, CCL28, CXCL14, CXCL17, etc. A non-limiting example of a linker is T2A, E2A, P2A (see Table 13), or the like. The composition may feature a different linker between each open reading frame.

TABLE 13

| | | SEQ |
|---|---|---|
| | SEQUENCE | ID NO: |
| T2A Linker | GGAAGCGGAGAGGGCAGGGGAAGTCTT | 176 |
| | CTAACATGCGGGGACGTGGAGGAAAAT | |
| | CCCGGCCCC | |
| E2A Linker | GGAAGCGGACAGTGTACTAATTATGCT | 177 |
| | CTCTTGAAATTGGCTGGAGATGTTGAG | |
| | AGCAACCCAGGTCCC | |
| P2A Linker | GGAAGCGGAGCCACGAACTTCTCTCTG | 178 |
| | TTAAAGCAAGCAGGAGATGTTGAAGAA | |
| | AACCCCGGGCCT | |
| | GCCGCCTAC | 179 |
| | GGCCCCGGCCCCGGC | 180 |
| 6-His Tag | CATCACCATCACCATCAC | 181 |

[0329] The present invention includes mRNA sequences encoding any of the vaccine compositions or portions thereof herein, e.g., a molecular adjuvant, a T cell enhancement, etc. The present invention also includes modified mRNA sequences encoding any of the vaccine compositions or portions thereof herein. The present invention also includes DNA sequence encoding any of the vaccine compositions or portions thereof herein.

[0330] In certain embodiments, nucleic acids of a vaccine composition herein are chemically modified. In some embodiments, the nucleic acids of a vaccine composition therein are unmodified. In some embodiments, all or a portion of the uracil in the open reading frame has a chemical modification. In some embodiments, a chemical modification is in the 5-position of the uracil. In some embodiments, a chemical modification is a N1-methyl pseudouridine. In some embodiments, all or a portion of the uracil in the open reading frame has a N1-methyl pseudouridine in the 5-position of the uracil.

[0331] In certain embodiments, an open reading frame of a vaccine composition herein encodes one antigen or epitopes. In some embodiments, an open reading frame of a vaccine composition herein encodes two or more antigens or epitopes. In some embodiments, an open reading frame of a vaccine composition herein encodes five or more antigens or epitopes. In some embodiments, an open reading frame of a vaccine composition herein encodes ten or more antigens or epitopes. In some embodiments, an open reading frame of a vaccine composition herein encodes 50 or more antigens or epitopes.

### Methods

[0332] In some embodiments, the method comprises determining one or more conserved large sequences that are derived from coronavirus sequences (e.g., SARS-CoV-2, variants, common cold coronaviruses, previously known coronavirus strains, animal coronaviruses, etc.). The method may comprise selecting at least one large conserved sequence and synthesizing an antigen (or antigens) comprising the selected large conserved sequence(s). The method may comprise synthesizing a nucleotide composition (e.g., DNA, modified DNA. mRNA, modified mRNA, antigen delivery system, etc.) encoding the antigen comprising the selected large conserved sequence(s). In some embodiments, the method further comprises creating a vaccine composition comprising the antigen, nucleotide compositions, and/or antigen delivery system and a pharmaceutical carrier. In some embodiments, the large sequences comprise one or more conserved epitopes described herein, e.g., one or more conserved B-cell target epitopes and/or one or more conserved CD4+ T cell target epitopes and/or one or more conserved CD8+ T cell target epitopes.

[0333] In some embodiments, each of the large sequences are conserved among two or a combination of: at least two SARS-CoV-2 human strains in current circulation, at least one coronavirus that has caused a previous human outbreak, at least one coronavirus isolated from bats, at least one coronavirus isolated from pangolin, at least one coronavirus isolated from civet cats, at least one coronavirus strain isolated from mink, and at least one coronavirus strain isolated from camels or any other animal that is receptive to coronavirus.

[0334] As previously discussed, the compositions described herein, e.g., the antigens, the vaccine compositions, the antigen delivery systems, the chemokines, the adjuvants, etc. may be used to prevent a coronavirus disease in a subject. In some embodiments, the compositions described herein, e.g.; the antigens, the vaccine compositions, the antigen delivery systems, the chemokines, the adjuvants, etc. may be used to prevent a coronavirus infection prophylactically in a subject. In some embodiments, the compositions described herein, e.g., the antigens, the vaccine compositions, the antigen delivery systems, the chemokines, the adjuvants, etc. may elicit an immune response in a subject. In some embodiments, the compositions described herein, e.g., the antigens, the vaccine compositions, the antigen delivery systems, the chemokines, the adjuvants, etc. may prolong an immune response induced by the multi-epitope pan-coronavirus vaccine composition and increases T-cell migration to the lungs.

[0335] Methods for preventing a coronavirus disease in a subject may comprise administering to the subject a therapeutically effective amount of a pan-coronavirus vaccine composition according to the present invention. In some embodiments, the composition elicits an immune response in the subject. In some embodiments, the composition induces memory B and T cells. In some embodiments, the composition induces resident memory T cells (Trm), in some embodiments, the composition prevents virus replication, e.g., in the areas where the virus normally replicates such as lungs, brain, heart, and kidney. In some embodiments, the composition prevents a cytokine storm, e.g., in the areas where the virus normally replicates such as lungs, brain, heart, and kidney. In some embodiments, the composition prevents inflammation or an inflammatory response, e.g., in the areas where the virus normally replicates such as lungs, brain, heart, and kidney. In some embodiments, the composition improves homing and retention of T cells, e.g., in the areas where the virus normally replicates such as lungs, brain, heart, and kidney.

[0336] Methods for preventing a coronavirus infection prophylactically in a subject may comprise administering to the subject a prophylactically effective amount of a pan-coronavirus vaccine composition according to the present invention. In some embodiments, the composition elicits an immune response in the subject. In some embodiments, the composition induces memory B and T cells. In some embodiments, the composition induces resident memory T cells (Trm). In some embodiments, the composition prevents virus replication, e.g., in the areas where the virus normally replicates such as lungs, brain, heart, and kidney. In some embodiments, the composition prevents a cytokine storm, e.g., in the areas where the virus normally replicates such as lungs, brain, heart, and kidney. In some embodiments, the composition prevents inflammation or an inflammatory response, e.g., in the areas where the virus normally replicates such as lungs, brain, heart, and kidney. In some embodiments, the composition improves homing and retention of T cells, e.g., in the areas where the virus normally replicates such as lungs, brain, heart, and kidney.

[0337] Methods for eliciting an immune response in a subject may comprise administering to the subject a vaccine composition according to the present invention, wherein the composition elicits an immune response in the subject. In some embodiments, the composition induces memory B and T cells. In some embodiments, the composition induces resident memory T cells (Trm). In some embodiments, the composition prevents virus replication, e.g., in the areas where the virus normally replicates such as lungs, brain, heart, and kidney. In some embodiments, the composition prevents a cytokine storm, e.g., in the areas where the virus normally replicates such as lungs, brain, heart, and kidney. In some embodiments, the composition prevents inflammation or an inflammatory response, e.g., in the areas where the virus normally replicates such as lungs, brain, heart, and kidney. In some embodiments, the composition improves homing and retention of T cells, e.g., in the areas where the virus normally replicates such as lungs, brain, heart, and kidney.

[0338] Methods for prolonging an immune response induced by a vaccine composition of the present invention and increasing T cell migration to particular tissues (e.g., lung, brain, heart, kidney, etc.) may comprise co-expressing a T-cell attracting chemokine, a composition that promotes T cell proliferation, and a vaccine composition (e.g., antigen) according to the present invention.

[0339] Methods for prolonging the retention of memory T-cell into the lungs induced by a vaccine composition of the present invention and increasing virus-specific tissue resident memory T-cells (TRM cells) may comprise co-expressing a T-cell attracting chemokine, a composition that promotes T cell proliferation, and a vaccine composition (e.g., antigen) according to the present invention.

[0340] The vaccine composition may be administered through standard means, e.g., through an intravenous route (i.v.), an intranasal route (i.n.), or a sublingual route (s.l.) route.

[0341] In certain embodiments, the method comprises administering to the subject a second (e.g., booster) dose. The second dose may comprise the same vaccine composition or a different vaccine composition. Additional doses of one or more vaccine compositions may be administered.

### Sequential Vaccine Delivery Methodology

[0342] In some embodiments, the present invention features a method of delivering the vaccine to induce heterologous immunity in a subject (e.g., prime/boost, see FIG. 25B and FIG. 26B). In some embodiments, the method comprises administering a first pan-coronavirus vaccine composition dose using a first delivery system. In further embodiments, the method comprises administering a second vaccine composition dose using a second delivery system. In some embodiments, the second composition is administered 8 days after administration of the first composition. In some embodiments, the second composition is administered 9 days after administration of the first composition. In some embodiments, the second composition is administered 10 days after administration of the first composition. In some embodiments, the second composition is administered 11 days after administration of the first composition. In some embodiments, the second composition is administered 12 days after administration of the first composition. In some embodiments, the second composition is administered 13 days after administration of the first composition. In some embodiments, the second composition is administered 14 days after administration of the first composition. In some embodiments, the second composition is administered from 14 to 30 days after administration of the first composition. In some embodiments, the second composition is administered from 30 to 60 days after administration of the first composition. In other embodiments, the first delivery system and the second delivery system are different. In some embodiments, the peptide vaccine composition is administered 14-days after the administration of the first vaccine composition dose. In some embodiments, the peptide vaccine composition is administered 30 or 60 days after the administration of the first vaccine composition dose.

[0343] In some embodiments, the first delivery system or the second delivery system comprises an mRNA, a modified mRNA or a peptide vector. In other embodiments, the peptide vector comprises adenovirus or an adeno-associated virus vector.

[0344] In some embodiments, the present invention features a method of delivering the vaccine to induce heterologous immunity in a subject (i.e. prime/pull, see FIG. 25A and FIG. 26A). In some embodiments, the method comprises administering a pan-coronavirus vaccine composition. In further embodiments, the method comprises administering at least one T-cell attracting chemokine after administering the pan-coronavirus vaccine composition. In some embodiments, the T-cell attracting chemokine is administered 8 days after the vaccine composition is administered. In some embodiments, the T-cell attracting chemokine is administered 9 days after the vaccine composition is administered. In some embodiments, the T-cell attracting chemokine is administered 10 days after the vaccine composition is administered. In some embodiments, the T-cell attracting chemokine is administered 11 days after the vaccine composition is administered. In some embodiments, the T-cell attracting chemokine is administered 12 days after the vaccine composition is administered. In some embodiments, the T-cell attracting chemokine is administered 13 days after the vaccine composition is administered. In some embodiments, the T-cell attracting chemokine is administered 14 days after the vaccine composition is administered. In some embodiments, the T-cell attracting chemokine is administered from 14 to 30 days after administration of the vaccine composition. In some embodiments, the T-cell attracting chemokine is administered from 30 to 60 days after administration of the vaccine composition. In some embodiments, the T cell-attracting chemokine composition is administered 8 to 14-days after the administration of the final vaccine composition dose. In some embodiments, the cell-attracting chemokine composition is administered 30 or 60 days after the administration of the final vaccine composition dose.

[0345] The present invention also features a novel “prime, pull, and boost” strategy. In other embodiments, the present invention features a method to increase the size and maintenance of lung-resident B-cells, CD4+ T cells and CD8+ T cells to protect against SARS-CoV-2 (FIG. 25D and FIG. 26D). In some embodiments, the method comprises administering a pan-coronavirus vaccine composition. In other embodiments, the method comprises administering at least one T-cell attracting chemokine after administering the pan-coronavirus vaccine composition. In further embodiments, the method comprises administering at least one cytokine after administering the T-cell attracting chemokine. In some embodiments, the T-cell attracting chemokine is administered 14 days after administering the pan-coronavirus composition. In other embodiments, the cytokine is administered 10 days after administering the T-cell attracting chemokine. In some embodiments, the T-cell attracting chemokine is administered 8 days after the vaccine composition is administered. In some embodiments, the T-cell attracting chemokine is administered 9 days after the vaccine composition is administered. In some embodiments, the T-cell attracting chemokine is administered 10 days after the vaccine composition is administered. In some embodiments, the T-cell attracting chemokine is administered 11 days after the vaccine composition is administered. In some embodiments, the T-cell attracting chemokine is administered 12 days after the vaccine composition is administered. In some embodiments, the T-cell attracting chemokine is administered 13 days after the vaccine composition is administered. In some embodiments, the T-cell attracting chemokine is administered 14 days after the vaccine composition is administered. In some embodiments, the T-cell attracting chemokine is administered from 14 to 30 days after administration of the vaccine composition. In some embodiments, the T-cell attracting chemokine is administered from 30 to 60 days after administration of the vaccine composition. In some embodiments, the cytokine is administered 8 days after administering the T-cell attracting chemokine. In some embodiments, the cytokine is administered 9 days after administering the T-cell attracting chemokine. In some embodiments, the cytokine is administered 10 days after administering the T-cell attracting chemokine. In some embodiments, the cytokine is administered 11 days after administering the T-cell attracting chemokine. In some embodiments, the cytokine is administered 12 days after administering the T-cell attracting chemokine. In some embodiments, the cytokine is administered 13 days after administering the T-cell attracting chemokine. In some embodiments, the cytokine is administered 14 days after administering the T-cell attracting chemokine. In some embodiments, the cytokine is administered from 14 to 30 days after administering the T-cell attracting chemokine. In some embodiments, the cytokine is administered from 30 to 60 days after administering the T-cell attracting chemokine. In some embodiments, the cytokine composition is administered 8 to 14-days after the administration of the T cell-attracting chemokine. In some embodiments, the cytokine composition is administered 30 or 60 days after the administration of the T cell-attracting chemokine.

[0346] The present invention further features a novel “prime, pull, and keep” strategy (FIG. 25C and FIG. 26C). In further embodiments, the present invention features a method to increase the size and maintenance of lung-resident B-cells, CD4+ T cells and CD8+ T cells to protect against SARS-CoV-2. In some embodiments, the method comprises administering a pan-coronavirus vaccine composition. In other embodiments, the method comprises administering at least one T-cell attracting chemokine after administering the pan-coronavirus vaccine composition. In further embodiments, the method comprises administering at least one mucosal chemokine after administering the T-cell attracting chemokine. In some embodiments, the T-cell attracting chemokine is administered 14 days after administering the pan-coronavirus composition. In other embodiments, the mucosal chemokines is administered 10 days after administering the T-cell attracting chemokine. In some embodiments, the T-cell attracting chemokine is administered 8 days after the vaccine composition is administered. In some embodiments, the T-cell attracting chemokine is administered 9 days after the vaccine composition is administered. In some embodiments, the T-cell attracting chemokine is administered 10 days after the vaccine composition is administered. In some embodiments, the T-cell attracting chemokine is administered 11 days after the vaccine composition is administered. In some embodiments, the T-cell attracting chemokine is administered 12 days after the vaccine composition is administered. In some embodiments, the T-cell attracting chemokine is administered 13 days after the vaccine composition is administered. In some embodiments, the T-cell attracting chemokine is administered 14 days after the vaccine composition is administered. In some embodiments, the T-cell attracting chemokine is administered from 14 to 30 days after administration of the vaccine composition. In some embodiments, the T-cell attracting chemokine is administered from 30 to 60 days after administration of the vaccine composition. In some embodiments, the mucosal chemokine is administered 8 days after administering the T-cell attracting chemokine. In some embodiments, the mucosal chemokine is administered 9 days after administering the T-cell attracting chemokine. In some embodiments, the mucosal chemokine is administered 10 days after administering the T-cell attracting chemokine. In some embodiments, the mucosal chemokine is administered 11 days after administering the T-cell attracting chemokine. In some embodiments, the mucosal chemokine is administered 12 days after administering the T-cell attracting chemokine. In some embodiments, the mucosal chemokine is administered 13 days after administering the T-cell attracting chemokine. In some embodiments, the mucosal chemokine is administered 14 days after administering the T-cell attracting chemokine. In some embodiments, the mucosal chemokine is administered from 14 to 30 days after administering the T-cell attracting chemokine. In some embodiments, the mucosal chemokine is administered from 30 to 60 days after administering the T-cell attracting chemokine. In some embodiments, the mucosal chemokine composition is administered 8 to 14-days after the administration of the T cell-attracting chemokine. In some embodiments, the mucosal cytokine composition is administered 30 or 60 days after the administration of the T cell-attracting chemokine.

[0347] In some embodiments, the mucosal chemokines may comprise CCL25, CCL28,CXCL14, CXCL17, or a combination thereof. In some embodiments, the T-cell attracting chemokines may comprise CCL5, CXCL9, CXCL10, CXC11, or a combination thereof. In some embodiments, the cytokines may comprise IL-15, IL-2, IL-7 or a combination thereof.

[0348] In some embodiments, the efficacy (or effectiveness) of a vaccine composition herein is greater than 60%. In some embodiments, the efficacy (or effectiveness) of a vaccine composition herein is greater than 70%. In some embodiments, the efficacy (or effectiveness) of a vaccine composition herein is greater than 80%. In some embodiments, the efficacy (or effectiveness) of a vaccine composition herein is greater than 90%. In some embodiments, the efficacy (or effectiveness) of a vaccine composition herein is greater than 95%.

[0349] Vaccine efficacy may be assessed using standard analyses (see, e.g., Weinberg et al., J Infect Dis. 2010 Jun. 1; 201(11):1607-10). For example, vaccine efficacy may be measured by double-blind, randomized, clinical controlled trials. Vaccine efficacy may be expressed as a proportionate reduction in disease attack rate (AR) between the unvaccinated (ARU) and vaccinated (ARV) study cohorts and can be calculated from the relative risk (RR) of disease among the vaccinated group with use of the following formulas: Efficacy=(ARU−ARV)/ARU×100; and Efficacy=(1−RR)×100.

[0350] Likewise, vaccine effectiveness may be assessed using standard analyses (see, e.g., Weinberg et al., J Infect Dis. 2010 Jun. 1; 201(11):1607-10). Vaccine effectiveness is an assessment of how a vaccine (which may have already proven to have high vaccine efficacy) reduces disease in a population. This measure can assess the net balance of benefits and adverse effects of a vaccination program, not just the vaccine itself, under natural field conditions rather than in a controlled clinical trial. Vaccine effectiveness is proportional to vaccine efficacy (potency) but is also affected by how well target groups in the population are immunized, as well as by other non-vaccine-related factors that influence the ‘real-world’ outcomes of hospitalizations, ambulatory visits, or costs. For example, a retrospective case control analysis may be used, in which the rates of vaccination among a set of infected cases and appropriate controls are compared. Vaccine effectiveness may be expressed as a rate difference, with use of the odds ratio (OR) for developing infection despite vaccination: Effectiveness=(1−OR)×100.

[0351] In some embodiments, the vaccine immunizes the subject against a coronavirus for up to 1 year. In some embodiments, the vaccine immunizes the subject against a coronavirus for up to 2 years. In some embodiments, the vaccine immunizes the subject against a coronavirus for more than 1 year, more than 2 years, more than 3 years, more than 4 years, or for 5-10 years.

[0352] In some embodiments, the subject is a young adult between the ages of about 20 years and about 50 years (e.g., about 20, 25, 30, 35, 40, 45 or 50 years old).

[0353] In some embodiments, the subject is an elderly subject about 60 years old, about 70 years old, or older (e.g., about 60, 65, 70, 75, 80, 85 or 90 years old).

[0354] In some embodiments, the subject is about 5 years old or younger. For example, the subject may be between the ages of about 1 year and about 5 years (e.g., about 1, 2, 3, 5 or 5 years), or between the ages of about 6 months and about 1 year (e.g., about 6, 7, 8, 9, 10, 11 or 12 months). In some embodiments, the subject is about 12 months or younger (e.g., 12, 11, 10, 9, 8, 7, 6, 5, 4, 3, 2 months or 1 month). In some embodiments, the subject is about 6 months or younger.

[0355] In some embodiments, the subject was born full term (e.g., about 37-42 weeks). In some embodiments, the subject was born prematurely, for example, at about 36 weeks of gestation or earlier (e.g., about 36, 35, 34, 33, 32, 31, 30, 29, 28, 27, 26 or 25 weeks). For example, the subject may have been born at about 32 weeks of gestation or earlier. In some embodiments, the subject was born prematurely between about 32 weeks and about 36 weeks of gestation. In such subjects, a vaccine may be administered later in life, for example, at the age of about 6 months to about 5 years, or older.

[0356] In some embodiments, the subject is pregnant (e.g., in the first, second or third trimester) when administered a vaccine.

[0357] In some embodiments, the subject has a chronic pulmonary disease (e.g., chronic obstructive pulmonary disease (COPD) or asthma) or is at risk thereof. Two forms of COPD include chronic bronchitis, which involves a long-term cough with mucus, and emphysema, which involves damage to the lungs over time. Thus, a subject administered a vaccine may have chronic bronchitis or emphysema.

[0358] In some embodiments, the subject has been exposed to a coronavirus. In some embodiments, the subject is infected with a coronavirus. In some embodiments, the subject is at risk of infection by a coronavirus.

[0359] In some embodiments, the subject is immunocompromised (has an impaired immune system, e.g., has an immune disorder or autoimmune disorder).

### Pharmaceutical Carriers

[0360] In certain embodiments, the vaccine composition further comprises a pharmaceutical carrier. Pharmaceutical carriers are well known to one of ordinary skill in the art. For example, in certain embodiments, the pharmaceutical carrier is selected from the group consisting of water, an alcohol, a natural or hardened oil, a natural or hardened wax, a calcium carbonate, a sodium carbonate, a calcium phosphate, kaolin, talc, lactose and combinations thereof. In some embodiments, the pharmaceutical carrier may comprise a lipid nanoparticle, an adenovirus vector, or an adeno-associated virus vector. In some embodiments, the vaccine composition is constructed using an adeno-associated virus vectors-based antigen delivery system.

[0361] Also provided herein is vaccine of any one of the foregoing paragraphs, formulated in a nanoparticle (e.g., a lipid nanoparticle). In some embodiments, the nanoparticle has a mean diameter of 50-200 nm. In some embodiments, the nanoparticle is a lipid nanoparticle. In some embodiments, the lipid nanoparticle comprises a cationic lipid, a PEG-modified lipid, a sterol and a non-cationic lipid. In some embodiments, the lipid nanoparticle comprises a molar ratio of about 20-60% cationic lipid, 0.5-15% PEG-modified lipid, 25-55% sterol, and 25% non-cationic lipid. In some embodiments, the cationic lipid is an ionizable cationic lipid, and the non-cationic lipid is a neutral lipid, and the sterol is a cholesterol. In some embodiments, the cationic lipid is selected from 2,2-dilinoleyl-4-dimethylaminoethyl-[1,3]-dioxolane (DLin-KC2-DMA), dilinoleyl-methyl-4-dimethylaminobutyrate (DLin-MC3-DMA), and di((Z)-non-2-en-1-yl) 9-((4-(dimethylamino)butanoyl)oxy)heptadecanedioate (L319).

### Hybrid Vaccine Candidates

[0362] Referring now to FIGS. 30, 31, 32A, and 32B, the present invention may further feature a pan-coronavirus-influenza recombinant vaccine composition. The composition comprises at least a portion of a coronavirus spike (S) protein and at least a portion of an influenza hemagglutinin (HA) protein.

[0363] In some embodiments, the portion of an influenza hemagglutinin (HA) protein is highly conserved among human influenza viruses. The portion of an influenza hemagglutinin (HA) protein may be derived from one or more of: H1N1 virus strain, H3N2 virus strain, influenza B virus strains, or variants thereof.

[0364] In some embodiments, the H1N1 virus strains or variants are selected from 28566 available complete genome sequences in NCBI for hemagglutinin (HA) gene. Some of the prominent strains are: OK384178.1, OM642156.1, OM654386.1, OL840606.1, OK625377.1, OM865246.1, OM935941.1, OM642158.1, OM935953.1, MW840068.1, MW839847.1, MW839825.1, MW930730.1, MT227010.1, LC638096.1, LC638077.1, LC637999.1, and LC645067.1. In some embodiments, the H3N2 virus strains or variants are selected from 33620 available complete genome sequences in NCBI for hemagglutinin (HA) gene. Some of the prominent strains are: MZ005227.1, MW849238.1, MZ203409.1, MZ198318.1, MZ198312.1, MZ198295.1, MZ198289.1, MZ198265.1, MW789449.1, MW798370.1, MW790182.1, MW789645.1, MW789778.1, MW789685.1, MW789659.1, and MW790001.1. In some embodiments, the influenza B virus strains or variants are selected from 16596 available complete genome sequences in NCBI for hemagglutinin (HA) gene. Some of the prominent strains are: M10298.1, MT7385253, MT808048.1, MT056751.1, MT314641.1, MT874090.1, MT242979.1, MT315665.1, MT105564.0.1, MT057563.1, MT056955.1, MT243019.1, MT306916.1, MT057571.1, MT314793.1, MT343026.1, MT874109.1, MT243795.1, MT315769.1, and KX885875.1.

[0365] Table 14: Shows non-limiting examples of a portion of an influenza hemagglutinin (HA) protein that may be used in accordance with the present invention.

| | | SEQ ID |
|---|---|---|
| | Sequence | NO: |
| HA (nucleotide) | TTCGGAGCTATTGCTGGTTTCTTGGAAGGAGGATGGGAAGGAATGA | 384 |
| | TTGCAGGTTGGCACGGATACACATCTCATGGAGCACATGGAGTAGC | |
| | AGTGGCAGCAGACCTTAAGAGTACCCA | |
| HA | FGAIAGFLEGGWEGMIAGWHGYTSHGAHGVAVAADLKSTX | 385 |
| (amino acid) | | |
| HA-H1N1 | ATGAAGGCAATACTAGTAGTTCTGCTATATACATTTGCAACCGCAAA | 386 |
| | TGCAGACACATTATGTATAGGTTATCATGCGAACAACTCAACAGACA | |
| | CTGTAGACACAGTACTAGAAAAGAATGTAACAGTAACACACTCTGTT | |
| | AACCTTCTAGAAGACAAGCATAACGGGAAACTATGCAAACTAAGAG | |
| | GGGTAGCCCCATTGCATTTGGGTAAATGTAACATTGCTGGCTGGAT | |
| | CCTGGGAAATCCAGAGTGTGAATCACTCTCCACAGCAAGCTCATGG | |
| | TCCTACATTGTGGAAACATCTAGTTCAGACAATGGAACGTGTTACCC | |
| | AGGAGATTTCATCGATTATGAGGAGCTAAGAGAGCAATTGAGCTCA | |
| | GTGTCATCATTTGAAAGGTTTGAGATATTCCCCAAGACAAGTTCATG | |
| | GCCCAATCATGACTCGAACAAAGGTGTAACGACAGCATGTCCTCAT | |
| | GCTGGAGCAAAAAGCTTCTACAAAAATTTAATATGGCTAGTTAAAAA | |
| | AGGAAATTCATACCCAAAGCTCAGCAAATCCTACATTAATGATAAAG | |
| | GGAAAGAAGTCCTCGTGCTATGGGGCATTCACCATCCACCTACTAG | |
| | TGCTGACCAACAAAGTCTCTATCAGAATGCAGATGCATATGTTTTTG | |
| | TGGGGACATCAAGATACAGCAAGAAGTTCAAGCCGGAAATAGCAAT | |
| | AAGGCCCAAAGTGAGGGATCAAGAAGGGAGAATGAACTATTACTGG | |
| | ACACTAGTAGAGCCGGGAGACAAAATAACATTCGAAGCAACTGGAA | |
| | ATCTAGTGGTACCGAGATATGCATTCGCAATGGAAAGAAATGCTGG | |
| | ATCTGGTATTATCATTTCAGATACACCAGTCCACGATTGCAATACAA | |
| | CTTGTCAGACACCCAAGGGTGCTATAAACACCAGCCTCCCATTTCA | |
| | GAACATACATCCGATCACAATTGGAAAATGTCCAAAATATGTAAAAA | |
| | GCACAAAATTGAGACTGGCCACAGGATTGAGGAATGTCCCGTCCAT | |
| | TCAATCTAGAGGCCTATTTGGGGCCATTGCCGGTTTCATTGAAGGG | |
| | GGGTGGACAGGGATGGTAGATGGATGGTACGGTTATCACCATCAAA | |
| | ATGAGCAGGGGTCAGGATATGCAGCCGACCTGAAGAGCACACAGA | |
| | ATGCCATTGACGAGATTACTAACAAAGTAAACTCTGTTATTGAAAAAA | |
| | TGAATACACAGTTCACAGCAGTAGGTAAAGAGTTCAACCACCTGGAA | |
| | AAAAGAATAGAGAATTTAAATAAAAAAGTTGATGATGGTTTCCTGGA | |
| | CATTTGGACTTACAATGCCGAACTGTTGGTTCTATTGGAAAATGAAA | |
| | GAACTTTGGACTACCACGATTCAAAGGTGAAGAACTTATATGAAAAG | |
| | GTAAGAAGCCAGTTAAAAAACAATGCCAAGGAAATTGGAAACGGCT | |
| | GCTTTGAATTTTACCACAAATGTGATAACACGTGCATGGAAAGTGTC | |
| | AAAAATGGGACTTATGACTACCCAAAATACTCAGAGGAAGCAAAATT | |
| | AAACAGAGAAGAAATAGATGGGGTAAAGCTGGAATCAACAAGGATT | |
| | TACCAGATTTTGGCGATCTATTCAACCGTCGCCAGTTCATTGGTACT | |
| | GGTAGTCTCCCTGGGGGCAATCAGTTTCTGGATGTGCTCTAATGGG | |
| | TCTCTACAGTGTAGAATATGTATTTAA | |
| HA H3N2 | AGCAAAAGCAGGGGATAATTCTATTAACCATGAAGACTATCATTGCT | 387 |
| | TTGAGCTACATTCTATGTCTGGTTTTCGCTCAAAAACTTCCTGGAAAT | |
| | GACAATAGCACTGCAACGCTGTGCCTTGGGCACCATGCAGTACCAA | |
| | ACGGAACGATAGTGAAAACAATCACGAATGACCAAATTGAAGTTACT | |
| | AATGCTACTGAGCTGGTTCAGAATTCCTCAATAGGTGAAATATGCGA | |
| | CAGTCCTCATCAGATCCTTGATGGAGAAAACTGCACACTAATAGATG | |
| | CTCTATTGGGAGACCCTCAGTGTGATGGCTTTCAAAATAAGAAATGG | |
| | GACCTTTTTGTTGAACGAAGCAAAGCCTACAGCAACTGTTACCCTTA | |
| | TGATGTGCCGGATTATGCCTCCCTTAGGTCACTAGTTGCCTCATCCG | |
| | GCACACTGGAGTTTAACAATGAAAGCTTCAATTGGGCTGGAGTCACT | |
| | CAAAACGGAACAAGTTCTGCTTGCATAAGGGGATCTAATAGTAGTTT | |
| | CTTTAGTAGATTAAATTGGTTGACCCACTTAAACTTCAAGTACCCAG | |
| | CATTGAACGTGACTATGCCAAACAATGAACAATTTGACAAATTGTAC | |
| | ATTTGGGGGGTTCACCACCCGGGTACGGACAAGGACCAAATCTTCC | |
| | TGTATGCTCAATCATCAGGAAGAATCACAGTATCTACCAAAAGAAGC | |
| | CAACAAGCTGTAATCCCGAATATCGGATCTAGACCCAGAATAAGGAA | |
| | TATCCCTAGCAGAATAAGCATCTATTGGACAATAGTAAAACCGGGAG | |
| | ACATACTTTTGATTAACAGCACAGGGAATCTAATTGCTCCTAGGGGT | |
| | TACTTCAAAATACGAAGTGGGAAAAGCTCAATAATGAGATCAGATGC | |
| | ACCCATTGGCAAATGCAAGTCTGAATGCATCACTCCAAATGGAAGCA | |
| | TTCCCAATGACAAACCATTCCAAAATGTAAACAGGATCACATACGGG | |
| | GCCTGTCCCAGATATGTTAAGCAAAGCACTCTGAAATTGGCAACAG | |
| | GAATGCGAAATGTACCAGAGAAACAAACTAGAGGCATATTTGGCGC | |
| | AATAGCGGGTTTCATAGAAAATGGTTGGGAGGGAATGGTGGATGGT | |
| | TGGTACGGTTTCAGGCATCAAAATTCTGAGGGAAGAGGACAAGCAG | |
| | CAGATCTCAAAAGCACTCAAGCAGCAATCGATCAAATCAATGGGAA | |
| | GCTGAATCGATTGATCGGGAAAACCAACGAGAAATTCCATCAGATTG | |
| | AGAAAGAATTCTCAGAAGTAGAAGGGAGAATTCAGGACCTTGAGAA | |
| | ATATGTTGAGGACACAAAAATAGATCTCTGGTCATACAACGCAGAGC | |
| | TTCTTGTTGCCCTGGAAAACCAACATACAATTGATCTAACTGACTCA | |
| | GAAATGAACAAACTGTTTGAAAAAACAAAGAAGCAACTGAGGGAAAA | |
| | TGCTGAGGATATGGGCAATGGTTGTTTCAAAATATACCACAAATGTG | |
| | ACAATGCCTGCATAGGATCAATCAGAAATGGAACTTATGACCACGAT | |
| | GTATACAGGGATGAAGCATTAAACAACCGGTTCCAGATCAAGGGAG | |
| | TTGAGCTGAAGTCAGGGTACAAAGATTGGATCCTATGGATTTCCTTT | |
| | GCCATATCATGTTTTTTGCTTTGTGTTGCTTTGTTGGGGTTCATCATG | |
| | TGGGCCTGCCAAAAGGGCAACATTAGGTGCAACATTTGCATTTGAG | |
| | TGCATTAATTAAAAACACCCTTGTTTCTACT | |
| HA influenza B | ATTTTCTAATATCCACAAAATGAAGGCAATAATTGTACTACTCATGGT | 388 |
| | AGTAACATCCAATGCAGATCGAATCTGCACTGGGATAACATCGTCAA | |
| | ACTCACCACATGTCGTCAAAACTGCTACTCAAGGGGAGGTCAACGT | |
| | GACCGGTGTAATACCACTGACAACAACACCCACCAAATCTCATTTTG | |
| | CAAATCTCAAAGGAACAGAAACCAGGGGGAAACTATGCCCAAAATG | |
| | CCTCAACTGCACAGATCTGGATGTAGCCTTGGGCAGACCAAAATGC | |
| | ACAGGGAAAATACCCTCTGCAAGGGTTTCAATACTCCATGAAGTCAG | |
| | ACCTGTTACATCTGGGTGCTTTCCTATAATGCACGATAGAACAAAAA | |
| | TTAGACAGCTGCCTAACCTTCTCCGAGGATACGAACATGTCAGGTTA | |
| | TCAACTCACAACGTTATCAATGCAAAAGATGCACCAGGAAGACCCTA | |
| | CGAAATTGGAACCTCAGGGTCTTGCCCTAACATTACCAATGGAAAC | |
| | GGATTCTTCGCAACAATGGCTTGGGCCGTCCCAAAAAACAAAACAG | |
| | CAACAAATCCATTAACAATAGAAGTACCATACATTTGTACAGAAGGA | |
| | GAAGACCAAATTACCGTTTGGGGGTTCCACTCTGACAACGAGACCC | |
| | AAATGGCAAAGCTCTATGGGGACTCAAAGCCCCAGAAGTTCACCTC | |
| | ATCTGCCAACGGAGTGACCACACATTACGTTTCACAGATTGGTGGC | |
| | TTCCCAAATCAAACAGAAGACGGAGGACTACCACAAAGTGGCAGAA | |
| | TTGTTGTTGATTACATGGTGCAGAAATCTGGAAAAACAGGAACAATT | |
| | ACCTATCAAAGAGGTATTTTATTGCCTCAAAAAGTGTGGTGCGCAAG | |
| | TGGCAGGAGCAAGGTAATAAAAGGATCCTTGCCCTTAATTGGAGAA | |
| | GCAGATTGCCTCCATGAAAAATACGGTGGATTAAACAAAAGCAAGC | |
| | CTTACTACACAGGGGAACATGCAAAGGCCATAGGAAATTGCCCAAT | |
| | ATGGGTGAAAACACCCTTGAAGCTGGCCAATGGAACCAAATATAGA | |
| | CCCCCTGCAAAACTATTAAAGGAAAGAGGTTTCTTCGGAGCCATTGC | |
| | TGGTTTCTTAGAGGGAGGATGGGAAGGAATGATTGCAGGTTGGCAC | |
| | GGATACACATCCCATGGGGCACATGGAGTAGCGGTGGCAGCTGAC | |
| | CTTAAGAGCACTCAAGAGGCCATAAACAAGATAACAAAAAATCTCAA | |
| | CTCTTTGAGTGAGCTGGAAGTAAAGAATCTTCAAAGACTAAGCGGTG | |
| | CCATGGATGAACTCCACAACGAAATACTAGAACTAGATGAGAAAGTG | |
| | GATGATCTCAGAGCTGACACAATAAGCTCACAAATAGAACTCGCAGT | |
| | CCTGCTTTCCAATGAAGGAATAATAAACAGTGAAGATGAACATCTCT | |
| | TGGCGCTTGAAAGAAAGCTGAAGAAAATGCTGGGCCCCTCTGCTGT | |
| | AGAGATAGGGAATGGATGCTTTGAAACCAAACACAAGTGCAACCAG | |
| | ACCTGCCTCGACAGAATAGCTGCTGGTACCTTTGATGCAGGAGAAT | |
| | TTTCTCTCCCCACCTTTGATTCACTGAATATTACTGCTGCATCTTTAA | |
| | ATGACGACGGATTGGACAATCATACTATACTGCTTTACTACTCAACT | |
| | GCTGCCTCCAGTTTGGCTGTAACACTGATGATAGCTATCTTTGTTGT | |
| | TTATATGGTCTCCAGAGACAATGTTTCTTGCTCCATTTGTCTATAAGG | |
| | AAAGTTAAGCCCTGTATTTTCCTTTATTGTAGTGCTTGTTTGCTTGTT | |
| | GTCATTACAAAGAAACGTTATTGAAAAAT | |

[0366] In some embodiments, the portion of a coronavirus spike (S) protein and the portion of an Influenza hemagglutinin (HA) protein are operatively linked to a generic promoter. The generic promoter may be a CMV or a AG promoter.

[0367] In some embodiments, the portion of a coronavirus spike (S) protein and the portion of an influenza hemagglutinin (HA) protein are separated by a linker. The linker may be 2 to 10 amino acids in length.

[0368] In some embodiments, the compositions described herein may be used to prevent a coronavirus and/or influenza infection prophylactically in a subject. In some embodiments, the compositions described herein may elicit an immune response in a subject.

TABLE 5
and FIG. 31 and 32B shows examples of vaccine compositions described herein.
The present invention is not limited to the examples in Table 4:

| Vaccine | | SEQ ID |
|---|---|---|
| Candidate | Sequence | NO: |
| 1 | TAGTTATTAATAGTAATCAATTACGGGGTCATTAGTTCATAGCCCATAT | 383 |
| promoter, | ATGGAGTTCCGCGTTACATAACTTACGGTAAATGGCCCGCCTGGCTG | |
| 5’UTR and | ACCGCCCAACGACCCCCGCCCATTGACGTCAATAATGACGTATGTTC | |
| leader | CCATAGTAACGCCAATAGGGACTTTCCATTGACGTCAATGGGTGGAG | |
| sequence. | TATTTACGGTAAACTGCCCACTTGGCAGTACATCAAGTGTATCATATG | |
| Spike | CCAAGTACGCCCCCTATTGACGTCAATGACGGTAAATGGCCCGCCTG | |
| glycoprotein | GCATTATGCCCAGTACATGACCTTATGGGACTTTCCTACTTGGCAGTA | |
| (HexaPro- | CATCTACGTATTAGTCATCGCTATTACCATGGTGATGCGGTTTTGGCA | |
| mutations), | GTACATCAATGGGCGTGGATAGCGGTTTGACTCACGGGGATTTCCAA | |
| [chemical structure] | GTCTCCACCCCATTGACGTCAATGGGAGTTTGTTTTGGCACCAAAAT | |
| [chemical structure] | CAACGGGACTTTCCAAAATGTCGTAACAACTCCGCCCCATTGACGCA | |
| [chemical structure] | AATGGGCGGTAGGCGTGTACGGTGGGAGGTCTATATAAGCAGAGCT | |
| | GGTTTAGTGAACCGTCAGATCGAGAATAAACTAGTATTCTTCTGGTCC | |
| | CCACAGACTCAGAGAGAACCCGCCACCATGTTCGTGTTCCTGGTGCT | |
| | GCTGCCCCTGGTGAGCAGCCAGTGCGTGAACCTGACCACCAGGACC | |
| | CAGCTGCCCCCCGCCTACACCAACAGCTTCACCAGGGGCGTGTACT | |
| | ACCCCGACAAGGTGTTCAGGAGCAGCGTGCTGCACAGCACCCAGGA | |
| | CCTGTTCCTGCCCTTCTTCAGCAACGTGACCTGGTTCCACGCCATCC | |
| | ACGTGAGCGGCACCAACGGCACCAAGAGGTTCGACAACCCCGTGCT | |
| | GCCCTTCAACGACGGCGTGTACTTCGCCAGCACCGAGAAGAGCAAC | |
| | ATCATCAGGGGCTGGATCTTCGGCACCACCCTGGACAGCAAGACCC | |
| | AGAGCCTGCTGATCGTGAACAACGCCACCAACGTGGTGATCAAGGT | |
| | GTGCGAGTTCCAGTTCTGCAACGACCCCTTCCTGGGCGTGTACTACC | |
| | ACAAGAACAACAAGAGCTGGATGGAGAGCGAGTTCAGGGTGTACAG | |
| | CAGCGCCAACAACTGCACCTTCGAGTACGTGAGCCAGCCCTTCCTG | |
| | ATGGACCTGGAGGGCAAGCAGGGCAACTTCAAGAACCTGAGGGAGT | |
| | TCGTGTTCAAGAACATCGACGGCTACTTCAAGATCTACAGCAAGCAC | |
| | ACCCCCATCAACCTGGTGAGGGACCTGCCCCAGGGCTTCAGCGCCC | |
| | TGGAGCCCCTGGTGGACCTGCCCATCGGCATCAACATCACCAGGTT | |
| | CCAGACCCTGCTGGCCCTGCACAGGAGCTACCTGACCCCCGGCGAC | |
| | AGCAGCAGCGGCTGGACCGCCGGCGCCGCCGCCTACTACGTGGGC | |
| | TACCTGCAGCCCAGGACCTTCCTGCTGAAGTACAACGAGAACGGCA | |
| | CCATCACCGACGCCGTGGACTGCGCCCTGGACCCCCTGAGCGAGAC | |
| | CAAGTGCACCCTGAAGAGCTTCACCGTGGAGAAGGGCATCTACCAG | |
| | ACCAGCAACTTCAGGGTGCAGCCCACCGAGAGCATCGTGAGGTTCC | |
| | CCAACATCACCAACCTGTGCCCCTTCGGCGAGGTGTTCAACGCCAC | |
| | CAGGTTCGCCAGCGTGTACGCCTGGAACAGGAAGAGGATCAGCAAC | |
| | TGCGTGGCCGACTACAGCGTGCTGTACAACAGCGCCAGCTTCAGCA | |
| | CCTTCAAGTGCTACGGCGTGAGCCCCACCAAGCTGAACGACCTGTG | |
| | CTTCACCAACGTGTACGCCGACAGCTTCGTGATCAGGGGCGACGAG | |
| | GTGAGGCAGATCGCCCCCGGCCAGACCGGCAAGATCGCCGACTACA | |
| | ACTACAAGCTGCCCGACGACTTCACCGGCTGCGTGATCGCCTGGAA | |
| | CAGCAACAACCTGGACAGCAAGGTGGGCGGCAACTACAACTACCTG | |
| | TACAGGCTGTTCAGGAAGAGCAACCTGAAGCCCTTCGAGAGGGACA | |
| | TCAGCACCGAGATCTACCAGGCCGGCAGCACCCCCTGCAACGGCGT | |
| | GGAGGGCTTCAACTGCTACTTCCCCCTGCAGAGCTACGGCTTCCAG | |
| | CCCACCAACGGCGTGGGCTACCAGCCCTACAGGGTGGTGGTGCTGA | |
| | GCTTCGAGCTGCTGCACGCCCCCGCCACCGTGTGCGGCCCCAAGAA | |
| | GAGCACCAACCTGGTGAAGAACAAGTGCGTGAACTTCAACTTCAACG | |
| | GCCTGACCGGCACCGGCGTGCTGACCGAGAGCAACAAGAAGTTCCT | |
| | GCCCTTCCAGCAGTTCGGCAGGGACATCGCCGACACCACCGACGCC | |
| | GTGAGGGACCCCCAGACCCTGGAGATCCTGGACATCACCCCCTGCA | |
| | GCTTCGGCGGCGTGAGCGTGATCACCCCCGGCACCAACACCAGCAA | |
| | CCAGGTGGCCGTGCTGTACCAGGACGTGAACTGCACCGAGGTGCCC | |
| | GTGGCCATCCACGCCGACCAGCTGACCCCCACCTGGAGGGTGTACA | |
| | GCACCGGCAGCAACGTGTTCCAGACCAGGGCCGGCTGCCTGATCG | |
| | GCGCCGAGCACGTGAACAACAGCTACGAGTGCGACATCCCCATCGG | |
| | CGCCGGCATCTGCGCCAGCTACCAGACCCAGACCAACAGCCCCGGC | |
| | AGCGCCAGCAGCGTGGCCAGCCAGAGCATCATCGCCTACACCATGA | |
| | GCCTGGGCGCCGAGAACAGCGTGGCCTACAGCAACAACAGCATCGC | |
| | CATCCCCACCAACTTCACCATCAGCGTGACCACCGAGATCCTGCCCG | |
| | TGAGCATGACCAAGACCAGCGTGGACTGCACCATGTACATCTGCGG | |
| | CGACAGCACCGAGTGCAGCAACCTGCTGCTGCAGTACGGCAGCTTC | |
| | TGCACCCAGCTGAACAGGGCCCTGACCGGCATCGCCGTGGAGCAG | |
| | GACAAGAACACCCAGGAGGTGTTCGCCCAGGTGAAGCAGATCTACA | |
| | AGACCCCCCCCATCAAGGACTTCGGCGGCTTCAACTTCAGCCAGATC | |
| | CTGCCCGACCCCAGCAAGCCCAGCAAGAGGAGCCCCATCGAGGAC | |
| | CTGCTGTTCAACAAGGTGACCCTGGCCGACGCCGGCTTCATCAAGC | |
| | AGTACGGCGACTGCCTGGGCGACATCGCCGCCAGGGACCTGATCTG | |
| | CGCCCAGAAGTTCAACGGCCTGACCGTGCTGCCCCCCCTGCTGACC | |
| | GACGAGATGATCGCCCAGTACACCAGCGCCCTGCTGGCCGGCACCA | |
| | TCACCAGCGGCTGGACCTTCGGCGCCGGCCCCGCCCTGCAGATCC | |
| | CCTTCCCCATGCAGATGGCCTACAGGTTCAACGGCATCGGCGTGAC | |
| | CCAGAACGTGCTGTACGAGAACCAGAAGCTGATCGCCAACCAGTTCA | |
| | ACAGCGCCATCGGCAAGATCCAGGACAGCCTGAGCAGCACCCCCAG | |
| | CGCCCTGGGCAAGCTGCAGGACGTGGTGAACCAGAACGCCCAGGC | |
| | CCTGAACACCCTGGTGAAGCAGCTGAGCAGCAACTTCGGCGCCATC | |
| | AGCAGCGTGCTGAACGACATCCTGAGCAGGCTGGACCCCCCCGAGG | |
| | CCGAGGTGCAGATCGACAGGCTGATCACCGGCAGGCTGCAGAGCCT | |
| | GCAGACCTACGTGACCCAGCAGCTGATCAGGGCCGCCGAGATCAGG | |
| | GCCAGCGCCAACCTGGCCGCCACCAAGATGAGCGAGTGCGTGCTG | |
| | GGCCAGAGCAAGAGGGTGGACTTCTGCGGCAAGGGCTACCACCTGA | |
| | TGAGCTTCCCCCAGAGCGCCCCCCACGGCGTGGTGTTCCTGCACGT | |
| | GACCTACGTGCCCGCCCAGGAGAAGAACTTCACCACCGCCCCCGCC | |
| | ATCTGCCACGACGGCAAGGCCCACTTCCCCAGGGAGGGCGTGTTCG | |
| | TGAGCAACGGCACCCACTGGTTCGTGACCCAGAGGAACTTCTACGA | |
| | GCCCCAGATCATCACCACCGACAACACCTTCGTGAGCGGCAACTGC | |
| | GACGTGGTGATCGGCATCGTGAACAACACCGTGTACGACCCCCTGC | |
| | AGCCCGAGCTGGACAGCTTCAAGGAGGAGCTGGACAAGTACTTCAA | |
| | GAACCACACCAGCCCCGACGTGGACCTGGGCGACATCAGCGGCATC | |
| | AACGCCAGCGTGGTGAACATCCAGAAGGAGATCGACAGGCTGAACG | |
| | AGGTGGCCAAGAACCTGAACGAGAGCCTGATCGACCTGCAGGAGCT | |
| | GGGCAAGTACGAGCAGTACATCAAGTGGCCCTGGTACATCTGGCTG | |
| | GGCTTCATCGCCGGCCTGATCGCCATCGTGATGGTGACCATCATGCT | |
| | GTGCTGCATGACCAGCTGCTGCAGCTGCCTGAAGGGCTGCTGCAGC | |
| | TGCGGCAGCTGCTGCAAGTTCGACGAGGACGACAGCGAGCCCGTG | |
| | CTGAAGGGCGTGAAGCTGCACTACACCGGAAGCGGAGCCACGAACT | |
| | TCTCTCTGTTAAAGCAAGCAGGAGATGTTGAAGAAAACCCCGGGCCT | |
| | [chemical structure] | |
| 2 | TAGTTATTAATAGTAATCAATTACGGGGTCATTAGTTCATAGCCCATAT | 390 |
| promoter, | ATGGAGTTCCGCGTTACATAACTTACGGTAAATGGCCCGCCTGGCTG | |
| 5’UTR and | ACCGCCCAACGACCCCCGCCCATTGACGTCAATAATGACGTATGTTC | |
| leader | CCATAGTAACGCCAATAGGGACTTTCCATTGACGTCAATGGGTGGAG | |
| sequence. | TATTTACGGTAAACTGCCCACTTGGCAGTACATCAAGTGTATCATATG | |
| Spike | CCAAGTACGCCCCCTATTGACGTCAATGACGGTAAATGGCCCGCCTG | |
| glycoprotein | GCATTATGCCCAGTACATGACCTTATGGGACTTTCCTACTTGGCAGTA | |
| (two proline | CATCTACGTATTAGTCATCGCTATTACCATGGTGATGCGGTTTTGGCA | |
| substitutions), | GTACATCAATGGGCGTGGATAGCGGTTTGACTCACGGGGATTTCCAA | |
| [chemical structure] | GTCTCCACCCCATTGACGTCAATGGGAGTTTGTTTTGGCACCAAAAT | |
| [chemical structure] | CAACGGGACTTTCCAAAATGTCGTAACAACTCCGCCCCATTGACGCA | |
| [chemical structure] | AATGGGCGGTAGGCGTGTACGGTGGGAGGTCTATATAAGCAGAGCT | |
| | GGTTTAGTGAACCGTCAGATCGAGAATAAACTAGTATTCTTCcTGGTC | |
| | CCCACAGACTCAGAGAGAACCCGCCACCATGTTCGTGTTCCTGGTG | |
| | CTGCTGCCCCTGGTGAGCAGCCAGTGCGTGAACCTGACCACCAGGA | |
| | CCCAGCTGCCCCCCGCCTACACCAACAGCTTCACCAGGGGCGTGTA | |
| | CTACCCCGACAAGGTGTTCAGGAGCAGCGTGCTGCACAGCACCCAG | |
| | GACCTGTTCCTGCCCTTCTTCAGCAACGTGACCTGGTTCCACGCCAT | |
| | CCACGTGAGCGGCACCAACGGCACCAAGAGGTTCGACAACCCCGTG | |
| | CTGCCCTTCAACGACGGCGTGTACTTCGCCAGCACCGAGAAGAGCA | |
| | ACATCATCAGGGGCTGGATCTTCGGCACCACCCTGGACAGCAAGAC | |
| | CCAGAGCCTGCTGATCGTGAACAACGCCACCAACGTGGTGATCAAG | |
| | GTGTGCGAGTTCCAGTTCTGCAACGACCCCTTCCTGGGCGTGTACTA | |
| | CCACAAGAACAACAAGAGCTGGATGGAGAGCGAGTTCAGGGTGTAC | |
| | AGCAGCGCCAACAACTGCACCTTCGAGTACGTGAGCCAGCCCTTCC | |
| | TGATGGACCTGGAGGGCAAGCAGGGCAACTTCAAGAACCTGAGGGA | |
| | GTTCGTGTTCAAGAACATCGACGGCTACTTCAAGATCTACAGCAAGC | |
| | ACACCCCCATCAACCTGGTGAGGGACCTGCCCCAGGGCTTCAGCGC | |
| | CCTGGAGCCCCTGGTGGACCTGCCCATCGGCATCAACATCACCAGG | |
| | TTCCAGACCCTGCTGGCCCTGCACAGGAGCTACCTGACCCCCGGCG | |
| | ACAGCAGCAGCGGCTGGACCGCCGGCGCCGCCGCCTACTACGTGG | |
| | GCTACCTGCAGCCCAGGACCTTCCTGCTGAAGTACAACGAGAACGG | |
| | CACCATCACCGACGCCGTGGACTGCGCCCTGGACCCCCTGAGCGAG | |
| | ACCAAGTGCACCCTGAAGAGCTTCACCGTGGAGAAGGGCATCTACC | |
| | AGACCAGCAACTTCAGGGTGCAGCCCACCGAGAGCATCGTGAGGTT | |
| | CCCCAACATCACCAACCTGTGCCCCTTCGGCGAGGTGTTCAACGCC | |
| | ACCAGGTTCGCCAGCGTGTACGCCTGGAACAGGAAGAGGATCAGCA | |
| | ACTGCGTGGCCGACTACAGCGTGCTGTACAACAGCGCCAGCTTCAG | |
| | CACCTTCAAGTGCTACGGCGTGAGCCCCACCAAGCTGAACGACCTG | |
| | TGCTTCACCAACGTGTACGCCGACAGCTTCGTGATCAGGGGCGACG | |
| | AGGTGAGGCAGATCGCCCCCGGCCAGACCGGCAAGATCGCCGACT | |
| | ACAACTACAAGCTGCCCGACGACTTCACCGGCTGCGTGATCGCCTG | |
| | GAACAGCAACAACCTGGACAGCAAGGTGGGCGGCAACTACAACTAC | |
| | CTGTACAGGCTGTTCAGGAAGAGCAACCTGAAGCCCTTCGAGAGGG | |
| | ACATCAGCACCGAGATCTACCAGGCCGGCAGCACCCCCTGCAACGG | |
| | CGTGGAGGGCTTCAACTGCTACTTCCCCCTGCAGAGCTACGGCTTC | |
| | CAGCCCACCAACGGCGTGGGCTACCAGCCCTACAGGGTGGTGGTG | |
| | CTGAGCTTCGAGCTGCTGCACGCCCCCGCCACCGTGTGCGGCCCCA | |
| | AGAAGAGCACCAACCTGGTGAAGAACAAGTGCGTGAACTTCAACTTC | |
| | AACGGCCTGACCGGCACCGGCGTGCTGACCGAGAGCAACAAGAAGT | |
| | TCCTGCCCTTCCAGCAGTTCGGCAGGGACATCGCCGACACCACCGA | |
| | CGCCGTGAGGGACCCCCAGACCCTGGAGATCCTGGACATCACCCCC | |
| | TGCAGCTTCGGCGGCGTGAGCGTGATCACCCCCGGCACCAACACCA | |
| | GCAACCAGGTGGCCGTGCTGTACCAGGACGTGAACTGCACCGAGGT | |
| | GCCCGTGGCCATCCACGCCGACCAGCTGACCCCCACCTGGAGGGT | |
| | GTACAGCACCGGCAGCAACGTGTTCCAGACCAGGGCCGGCTGCCTG | |
| | ATCGGCGCCGAGCACGTGAACAACAGCTACGAGTGCGACATCCCCA | |
| | TCGGCGCCGGCATCTGCGCCAGCTACCAGACCCAGACCAACAGCCC | |
| | CAGGAGGGCCAGGAGCGTGGCCAGCCAGAGCATCATCGCCTACAC | |
| | CATGAGCCTGGGCGCCGAGAACAGCGTGGCCTACAGCAACAACAGC | |
| | ATCGCCATCCCCACCAACTTCACCATCAGCGTGACCACCGAGATCCT | |
| | GCCCGTGAGCATGACCAAGACCAGCGTGGACTGCACCATGTACATC | |
| | TGCGGCGACAGCACCGAGTGCAGCAACCTGCTGCTGCAGTACGGCA | |
| | GCTTCTGCACCCAGCTGAACAGGGCCCTGACCGGCATCGCCGTGGA | |
| | GCAGGACAAGAACACCCAGGAGGTGTTCGCCCAGGTGAAGCAGATC | |
| | TACAAGACCCCCCCCATCAAGGACTTCGGCGGCTTCAACTTCAGCCA | |
| | GATCCTGCCCGACCCCAGCAAGCCCAGCAAGAGGAGCTTCATCGAG | |
| | GACCTGCTGTTCAACAAGGTGACCCTGGCCGACGCCGGCTTCATCA | |
| | AGCAGTACGGCGACTGCCTGGGCGACATCGCCGCCAGGGACCTGAT | |
| | CTGCGCCCAGAAGTTCAACGGCCTGACCGTGCTGCCCCCCCTGCTG | |
| | ACCGACGAGATGATCGCCCAGTACACCAGCGCCCTGCTGGCCGGCA | |
| | CCATCACCAGCGGCTGGACCTTCGGCGCCGGCGCCGCCCTGCAGA | |
| | TCCCCTTCGCCATGCAGATGGCCTACAGGTTCAACGGCATCGGCGT | |
| | GACCCAGAACGTGCTGTACGAGAACCAGAAGCTGATCGCCAACCAG | |
| | TTCAACAGCGCCATCGGCAAGATCCAGGACAGCCTGAGCAGCACCG | |
| | CCAGCGCCCTGGGCAAGCTGCAGGACGTGGTGAACCAGAACGCCC | |
| | AGGCCCTGAACACCCTGGTGAAGCAGCTGAGCAGCAACTTCGGCGC | |
| | CATCAGCAGCGTGCTGAACGACATCCTGAGCAGGCTGGACCCCCCC | |
| | GAGGCCGAGGTGCAGATCGACAGGCTGATCACCGGCAGGCTGCAG | |
| | AGCCTGCAGACCTACGTGACCCAGCAGCTGATCAGGGCCGCCGAGA | |
| | TCAGGGCCAGCGCCAACCTGGCCGCCACCAAGATGAGCGAGTGCGT | |
| | GCTGGGCCAGAGCAAGAGGGTGGACTTCTGCGGCAAGGGCTACCA | |
| | CCTGATGAGCTTCCCCCAGAGCGCCCCCCACGGCGTGGTGTTCCTG | |
| | CACGTGACCTACGTGCCCGCCCAGGAGAAGAACTTCACCACCGCCC | |
| | CCGCCATCTGCCACGACGGCAAGGCCCACTTCCCCAGGGAGGGCG | |
| | TGTTCGTGAGCAACGGCACCCACTGGTTCGTGACCCAGAGGAACTT | |
| | CTACGAGCCCCAGATCATCACCACCGACAACACCTTCGTGAGCGGC | |
| | AACTGCGACGTGGTGATCGGCATCGTGAACAACACCGTGTACGACC | |
| | CCCTGCAGCCCGAGCTGGACAGCTTCAAGGAGGAGCTGGACAAGTA | |
| | CTTCAAGAACCACACCAGCCCCGACGTGGACCTGGGCGACATCAGC | |
| | GGCATCAACGCCAGCGTGGTGAACATCCAGAAGGAGATCGACAGGC | |
| | TGAACGAGGTGGCCAAGAACCTGAACGAGAGCCTGATCGACCTGCA | |
| | GGAGCTGGGCAAGTACGAGCAGTACATCAAGTGGCCCTGGTACATC | |
| | TGGCTGGGCTTCATCGCCGGCCTGATCGCCATCGTGATGGTGACCA | |
| | TCATGCTGTGCTGCATGACCAGCTGCTGCAGCTGCCTGAAGGGCTG | |
| | CTGCAGCTGCGGCAGCTGCTGCAAGTTCGACGAGGACGACAGCGAG | |
| | CCCGTGCTGAAGGGCGTGAAGCTGCACTACACCGGAAGCGGAGCCA | |
| | CGAACTTCTCTCTGTTAAAGCAAGCAGGAGATGTTGAAGAAAACCCC | |
| | [chemical structure] | |
| 3 | CTCGACATTGATTATTGACTAGTTATTAATAGTAATCAATTACGGGGT | 391 |
| promoter, | CATTAGTTCATAGCCCATATATGGAGTTCCGCGTTACATAACTTACGG | |
| 5’UTR and | TAAATGGCCCGCCTGGCTGACCGCCCAACGACCCCCGCCCATTGAC | |
| leader | GTCAATAATGACGTATGTTCCCATAGTAACGCCAATAGGGACTTTCCA | |
| sequence. | TTGACGTCAATGGGTGGAGTATTTACGGTAAACTGCCCACTTGGCAG | |
| Spike | TACATCAAGTGTATCATATGCCAAGTACGCCCCCTATTGACGTCAATG | |
| glycoprotein | ACGGTAAATGGCCCGCCTGGCATTATGCCCAGTACATGACCTTATGG | |
| (HexaPro- | GACTTTCCTACTTGGCAGTACATCTACGTATTAGTCATCGCTATTACC | |
| mutations), | ATGGTCGAGGTGAGCCCCACGTTCTGCTTCACTCTCCCCATCTCCCC | |
| [chemical structure] | CCCCTCCCCACCCCCAATTTTGTATTTATTTATTTTTTAATTATTTTGT | |
| [chemical structure] | GCAGCGATGGGGGCGGGGGGGGGGGGGGGGCGCGCGCCAGGCG | |
| [chemical structure] | GGGCGGGGCGGGGCGAGGGGCGGGGCGGGGCGAGGCGGAGAGG | |
| | TGCGGCGGCAGCCAATCAGAGCGGCGCGCTCCGAAAGTTTCCTTTT | |
| | ATGGCGAGGCGGCGGCGGCGGCGGCCCTATAAAAAGCGAAGCGCG | |
| | CGGCGGGCGGGAGTCGCTGCGCGCTGCCTTCGCCCCGTGCCCCGC | |
| | TCCGCCGCCGCCTCGCGCCGCCCGCCCCGGCTCTGACTGACCGCG | |
| | TTACTCCCACAGGTGAGCGGGCGGGACGGCCCTTCTCCTCCGGGCT | |
| | GTAATTAGCGCTTGGTTTAATGACGGCTTGTTTCTTTTCTGTGGCTGC | |
| | GTGAAAGCCTTGAGGGGCTCCGGGAGGGCCCTTTGTGCGGGGGGA | |
| | GCGGCTCGGGGGGTGCGTGCGTGTGTGTGTGCGTGGGGAGCGCCG | |
| | CGTGCGGCTCCGCGCTGCCCGGCGGCTGTGAGCGCTGCGGGCGCG | |
| | GCGCGGGGCTTTGTGCGCTCCGCAGTGTGCGCGAGGGGAGCGCGG | |
| | CCGGGGGCGGTGCCCCGCGGTGCGGGGGGGGCTGCGAGGGGAAC | |
| | AAAGGCTGCGTGCGGGGTGTGTGCGTGGGGGGGTGAGCAGGGGGT | |
| | GTGGGCGCGTCGGTCGGGCTGCAACCCCCCCTGCACCCCCCTCCC | |
| | CGAGTTGCTGAGCACGGCCCGGCTTCGGGTGCGGGGCTCCGTACG | |
| | GGGCGTGGCGCGGGGCTCGCCGTGCCGGGCGGGGGGTGGCGGCA | |
| | GGTGGGGGTGCCGGGCGGGGCGGGGCCGCCTCGGGCCGGGGAG | |
| | GGCTCGGGGGAGGGGCGCGGCGGCCCCCGGAGCGCCGGCGGCTG | |
| | TCGAGGCGCGGCGAGCCGCAGCCATTGCCTTTTATGGTAATCGTGC | |
| | GAGAGGGCGCAGGGACTTCCTTTGTCCCAAATCTGTGCGGAGCCGA | |
| | AATCTGGGAGGCGCCGCCGCACCCCCTCTAGCGGGCGCGGGGCGA | |
| | AGCGGTGCGGCGCCGGCAGGAAGGAAATGGGCGGGGAGGGCCTTC | |
| | GTGCGTCGCCGCGCCGCCGTCCCCTTCTCCCTCTCCAGCCTCGGGG | |
| | CTGTCCGCGGGGGGACGGCTGCCTTCGGGGGGGACGGGGCAGGG | |
| | CGGGGTTCGGCTTCTGGCGTGTGACCGGCGGCTCTAGAGCCTCTGC | |
| | TAACCATGTTCATGCCTTCTTCTTTTTCCTACAGCTCCTGGGCAACGT | |
| | GCTGGTTATTGTGCTGTCTCATCATTTTGGCAAAGAATTGGAGAATAA | |
| | ACTAGTATTCTTCTGGTCCCCACAGACTCAGAGAGAACCCGCCACCA | |
| | TGTTCGTGTTCCTGGTGCTGCTGCCCCTGGTGAGCAGCCAGTGCGT | |
| | GAACCTGACCACCAGGACCCAGCTGCCCCCCGCCTACACCAACAGC | |
| | TTCACCAGGGGCGTGTACTACCCCGACAAGGTGTTCAGGAGCAGCG | |
| | TGCTGCACAGCACCCAGGACCTGTTCCTGCCCTTCTTCAGCAACGTG | |
| | ACCTGGTTCCACGCCATCCACGTGAGCGGCACCAACGGCACCAAGA | |
| | GGTTCGACAACCCCGTGCTGCCCTTCAACGACGGCGTGTACTTCGC | |
| | CAGCACCGAGAAGAGCAACATCATCAGGGGCTGGATCTTCGGCACC | |
| | ACCCTGGACAGCAAGACCCAGAGCCTGCTGATCGTGAACAACGCCA | |
| | CCAACGTGGTGATCAAGGTGTGCGAGTTCCAGTTCTGCAACGACCC | |
| | CTTCCTGGGCGTGTACTACCACAAGAACAACAAGAGCTGGATGGAGA | |
| | GCGAGTTCAGGGTGTACAGCAGCGCCAACAACTGCACCTTCGAGTA | |
| | CGTGAGCCAGCCCTTCCTGATGGACCTGGAGGGCAAGCAGGGCAAC | |
| | TTCAAGAACCTGAGGGAGTTCGTGTTCAAGAACATCGACGGCTACTT | |
| | CAAGATCTACAGCAAGCACACCCCCATCAACCTGGTGAGGGACCTG | |
| | CCCCAGGGCTTCAGCGCCCTGGAGCCCCTGGTGGACCTGCCCATCG | |
| | GCATCAACATCACCAGGTTCCAGACCCTGCTGGCCCTGCACAGGAG | |
| | CTACCTGACCCCCGGCGACAGCAGCAGCGGCTGGACCGCCGGCGC | |
| | CGCCGCCTACTACGTGGGCTACCTGCAGCCCAGGACCTTCCTGCTG | |
| | AAGTACAACGAGAACGGCACCATCACCGACGCCGTGGACTGCGCCC | |
| | TGGACCCCCTGAGCGAGACCAAGTGCACCCTGAAGAGCTTCACCGT | |
| | GGAGAAGGGCATCTACCAGACCAGCAACTTCAGGGTGCAGCCCACC | |
| | GAGAGCATCGTGAGGTTCCCCAACATCACCAACCTGTGCCCCTTCG | |
| | GCGAGGTGTTCAACGCCACCAGGTTCGCCAGCGTGTACGCCTGGAA | |
| | CAGGAAGAGGATCAGCAACTGCGTGGCCGACTACAGCGTGCTGTAC | |
| | AACAGCGCCAGCTTCAGCACCTTCAAGTGCTACGGCGTGAGCCCCA | |
| | CCAAGCTGAACGACCTGTGCTTCACCAACGTGTACGCCGACAGCTTC | |
| | GTGATCAGGGGCGACGAGGTGAGGCAGATCGCCCCCGGCCAGACC | |
| | GGCAAGATCGCCGACTACAACTACAAGCTGCCCGACGACTTCACCG | |
| | GCTGCGTGATCGCCTGGAACAGCAACAACCTGGACAGCAAGGTGGG | |
| | CGGCAACTACAACTACCTGTACAGGCTGTTCAGGAAGAGCAACCTGA | |
| | AGCCCTTCGAGAGGGACATCAGCACCGAGATCTACCAGGCCGGCAG | |
| | CACCCCCTGCAACGGCGTGGAGGGCTTCAACTGCTACTTCCCCCTG | |
| | CAGAGCTACGGCTTCCAGCCCACCAACGGCGTGGGCTACCAGCCCT | |
| | ACAGGGTGGTGGTGCTGAGCTTCGAGCTGCTGCACGCCCCCGCCAC | |
| | CGTGTGCGGCCCCAAGAAGAGCACCAACCTGGTGAAGAACAAGTGC | |
| | GTGAACTTCAACTTCAACGGCCTGACCGGCACCGGCGTGCTGACCG | |
| | AGAGCAACAAGAAGTTCCTGCCCTTCCAGCAGTTCGGCAGGGACAT | |
| | CGCCGACACCACCGACGCCGTGAGGGACCCCCAGACCCTGGAGAT | |
| | CCTGGACATCACCCCCTGCAGCTTCGGCGGCGTGAGCGTGATCACC | |
| | CCCGGCACCAACACCAGCAACCAGGTGGCCGTGCTGTACCAGGACG | |
| | TGAACTGCACCGAGGTGCCCGTGGCCATCCACGCCGACCAGCTGAC | |
| | CCCCACCTGGAGGGTGTACAGCACCGGCAGCAACGTGTTCCAGACC | |
| | AGGGCCGGCTGCCTGATCGGCGCCGAGCACGTGAACAACAGCTAC | |
| | GAGTGCGACATCCCCATCGGCGCCGGCATCTGCGCCAGCTACCAGA | |
| | CCCAGACCAACAGCCCCGGCAGCGCCAGCAGCGTGGCCAGCCAGA | |
| | GCATCATCGCCTACACCATGAGCCTGGGCGCCGAGAACAGCGTGGC | |
| | CTACAGCAACAACAGCATCGCCATCCCCACCAACTTCACCATCAGCG | |
| | TGACCACCGAGATCCTGCCCGTGAGCATGACCAAGACCAGCGTGGA | |
| | CTGCACCATGTACATCTGCGGCGACAGCACCGAGTGCAGCAACCTG | |
| | CTGCTGCAGTACGGCAGCTTCTGCACCCAGCTGAACAGGGCCCTGA | |
| | CCGGCATCGCCGTGGAGCAGGACAAGAACACCCAGGAGGTGTTCGC | |
| | CCAGGTGAAGCAGATCTACAAGACCCCCCCCATCAAGGACTTCGGC | |
| | GGCTTCAACTTCAGCCAGATCCTGCCCGACCCCAGCAAGCCCAGCA | |
| | AGAGGAGCCCCATCGAGGACCTGCTGTTCAACAAGGTGACCCTGGC | |
| | CGACGCCGGCTTCATCAAGCAGTACGGCGACTGCCTGGGCGACATC | |
| | GCCGCCAGGGACCTGATCTGCGCCCAGAAGTTCAACGGCCTGACCG | |
| | TGCTGCCCCCCCTGCTGACCGACGAGATGATCGCCCAGTACACCAG | |
| | CGCCCTGCTGGCCGGCACCATCACCAGCGGCTGGACCTTCGGCGC | |
| | CGGCCCCGCCCTGCAGATCCCCTTCCCCATGCAGATGGCCTACAGG | |
| | TTCAACGGCATCGGCGTGACCCAGAACGTGCTGTACGAGAACCAGA | |
| | AGCTGATCGCCAACCAGTTCAACAGCGCCATCGGCAAGATCCAGGA | |
| | CAGCCTGAGCAGCACCCCCAGCGCCCTGGGCAAGCTGCAGGACGT | |
| | GGTGAACCAGAACGCCCAGGCCCTGAACACCCTGGTGAAGCAGCTG | |
| | AGCAGCAACTTCGGCGCCATCAGCAGCGTGCTGAACGACATCCTGA | |
| | GCAGGCTGGACCCCCCCGAGGCCGAGGTGCAGATCGACAGGCTGA | |
| | TCACCGGCAGGCTGCAGAGCCTGCAGACCTACGTGACCCAGCAGCT | |
| | GATCAGGGCCGCCGAGATCAGGGCCAGCGCCAACCTGGCCGCCAC | |
| | CAAGATGAGCGAGTGCGTGCTGGGCCAGAGCAAGAGGGTGGACTTC | |
| | TGCGGCAAGGGCTACCACCTGATGAGCTTCCCCCAGAGCGCCCCCC | |
| | ACGGCGTGGTGTTCCTGCACGTGACCTACGTGCCCGCCCAGGAGAA | |
| | GAACTTCACCACCGCCCCCGCCATCTGCCACGACGGCAAGGCCCAC | |
| | TTCCCCAGGGAGGGCGTGTTCGTGAGCAACGGCACCCACTGGTTCG | |
| | TGACCCAGAGGAACTTCTACGAGCCCCAGATCATCACCACCGACAAC | |
| | ACCTTCGTGAGCGGCAACTGCGACGTGGTGATCGGCATCGTGAACA | |
| | ACACCGTGTACGACCCCCTGCAGCCCGAGCTGGACAGCTTCAAGGA | |
| | GGAGCTGGACAAGTACTTCAAGAACCACACCAGCCCCGACGTGGAC | |
| | CTGGGCGACATCAGCGGCATCAACGCCAGCGTGGTGAACATCCAGA | |
| | AGGAGATCGACAGGCTGAACGAGGTGGCCAAGAACCTGAACGAGAG | |
| | CCTGATCGACCTGCAGGAGCTGGGCAAGTACGAGCAGTACATCAAG | |
| | TGGCCCTGGTACATCTGGCTGGGCTTCATCGCCGGCCTGATCGCCA | |
| | TCGTGATGGTGACCATCATGCTGTGCTGCATGACCAGCTGCTGCAGC | |
| | TGCCTGAAGGGCTGCTGCAGCTGCGGCAGCTGCTGCAAGTTCGACG | |
| | AGGACGACAGCGAGCCCGTGCTGAAGGGCGTGAAGCTGCACTACAC | |
| | CGGAAGCGGAGCCACGAACTTCTCTCTGTTAAAGCAAGCAGGAGAT | |
| | [chemical structure] | |
| 4 | CTCGACATTGATTATTGACTAGTTATTAATAGTAATCAATTACGGGGT | 392 |
| promoter, | CATTAGTTCATAGCCCATATATGGAGTTCCGCGTTACATAACTTACGG | |
| 5’UTR and | TAAATGGCCCGCCTGGCTGACCGCCCAACGACCCCCGCCCATTGAC | |
| leader | GTCAATAATGACGTATGTTCCCATAGTAACGCCAATAGGGACTTTCCA | |
| sequence. | TTGACGTCAATGGGTGGAGTATTTACGGTAAACTGCCCACTTGGCAG | |
| Spike | TACATCAAGTGTATCATATGCCAAGTACGCCCCCTATTGACGTCAATG | |
| glycoprotein | ACGGTAAATGGCCCGCCTGGCATTATGCCCAGTACATGACCTTATGG | |
| (two proline | GACTTTCCTACTTGGCAGTACATCTACGTATTAGTCATCGCTATTACC | |
| substitutions), | ATGGTCGAGGTGAGCCCCACGTTCTGCTTCACTCTCCCCATCTCCCC | |
| [chemical structure] | CCCCTCCCCACCCCCAATTTTGTATTTATTTATTTTTTAATTATTTTGT | |
| [chemical structure] | GCAGCGATGGGGGCGGGGGGGGGGGGGGGGCGCGCGCCAGGCG | |
| [chemical structure] | GGGCGGGGCGGGGCGAGGGGCGGGGCGGGGCGAGGCGGAGAGG | |
| | TGCGGCGGCAGCCAATCAGAGCGGCGCGCTCCGAAAGTTTCCTTTT | |
| | ATGGCGAGGCGGCGGCGGCGGCGGCCCTATAAAAAGCGAAGCGCG | |
| | CGGCGGGCGGGAGTCGCTGCGCGCTGCCTTCGCCCCGTGCCCCGC | |
| | TCCGCCGCCGCCTCGCGCCGCCCGCCCCGGCTCTGACTGACCGCG | |
| | TTACTCCCACAGGTGAGCGGGCGGGACGGCCCTTCTCCTCCGGGCT | |
| | GTAATTAGCGCTTGGTTTAATGACGGCTTGTTTCTTTTCTGTGGCTGC | |
| | GTGAAAGCCTTGAGGGGCTCCGGGAGGGCCCTTTGTGCGGGGGGA | |
| | GCGGCTCGGGGGGTGCGTGCGTGTGTGTGTGCGTGGGGAGCGCCG | |
| | CGTGCGGCTCCGCGCTGCCCGGCGGCTGTGAGCGCTGCGGGCGCG | |
| | GCGCGGGGCTTTGTGCGCTCCGCAGTGTGCGCGAGGGGAGCGCGG | |
| | CCGGGGGCGGTGCCCCGCGGTGCGGGGGGGGCTGCGAGGGGAAC | |
| | AAAGGCTGCGTGCGGGGTGTGTGCGTGGGGGGGTGAGCAGGGGGT | |
| | GTGGGCGCGTCGGTCGGGCTGCAACCCCCCCTGCACCCCCCTCCC | |
| | CGAGTTGCTGAGCACGGCCCGGCTTCGGGTGCGGGGCTCCGTACG | |
| | GGGCGTGGCGCGGGGCTCGCCGTGCCGGGCGGGGGGTGGCGGCA | |
| | GGTGGGGGTGCCGGGCGGGGCGGGGCCGCCTCGGGCCGGGGAG | |
| | GGCTCGGGGGAGGGGCGCGGCGGCCCCCGGAGCGCCGGCGGCTG | |
| | TCGAGGCGCGGCGAGCCGCAGCCATTGCCTTTTATGGTAATCGTGC | |
| | GAGAGGGCGCAGGGACTTCCTTTGTCCCAAATCTGTGCGGAGCCGA | |
| | AATCTGGGAGGCGCCGCCGCACCCCCTCTAGCGGGCGCGGGGCGA | |
| | AGCGGTGCGGCGCCGGCAGGAAGGAAATGGGCGGGGAGGGCCTTC | |
| | GTGCGTCGCCGCGCCGCCGTCCCCTTCTCCCTCTCCAGCCTCGGGG | |
| | CTGTCCGCGGGGGGACGGCTGCCTTCGGGGGGGACGGGGCAGGG | |
| | CGGGGTTCGGCTTCTGGCGTGTGACCGGCGGCTCTAGAGCCTCTGC | |
| | TAACCATGTTCATGCCTTCTTCTTTTTCCTACAGCTCCTGGGCAACGT | |
| | GCTGGTTATTGTGCTGTCTCATCATTTTGGCAAAGAATTGGAGAATAA | |
| | ACTAGTATTCTTCTGGTCCCCACAGACTCAGAGAGAACCCGCCACCA | |
| | TGTTCGTGTTCCTGGTGCTGCTGCCCCTGGTGAGCAGCCAGTGCGT | |
| | GAACCTGACCACCAGGACCCAGCTGCCCCCCGCCTACACCAACAGC | |
| | TTCACCAGGGGCGTGTACTACCCCGACAAGGTGTTCAGGAGCAGCG | |
| | TGCTGCACAGCACCCAGGACCTGTTCCTGCCCTTCTTCAGCAACGTG | |
| | ACCTGGTTCCACGCCATCCACGTGAGCGGCACCAACGGCACCAAGA | |
| | GGTTCGACAACCCCGTGCTGCCCTTCAACGACGGCGTGTACTTCGC | |
| | CAGCACCGAGAAGAGCAACATCATCAGGGGCTGGATCTTCGGCACC | |
| | ACCCTGGACAGCAAGACCCAGAGCCTGCTGATCGTGAACAACGCCA | |
| | CCAACGTGGTGATCAAGGTGTGCGAGTTCCAGTTCTGCAACGACCC | |
| | CTTCCTGGGCGTGTACTACCACAAGAACAACAAGAGCTGGATGGAGA | |
| | GCGAGTTCAGGGTGTACAGCAGCGCCAACAACTGCACCTTCGAGTA | |
| | CGTGAGCCAGCCCTTCCTGATGGACCTGGAGGGCAAGCAGGGCAAC | |
| | TTCAAGAACCTGAGGGAGTTCGTGTTCAAGAACATCGACGGCTACTT | |
| | CAAGATCTACAGCAAGCACACCCCCATCAACCTGGTGAGGGACCTG | |
| | CCCCAGGGCTTCAGCGCCCTGGAGCCCCTGGTGGACCTGCCCATCG | |
| | GCATCAACATCACCAGGTTCCAGACCCTGCTGGCCCTGCACAGGAG | |
| | CTACCTGACCCCCGGCGACAGCAGCAGCGGCTGGACCGCCGGCGC | |
| | CGCCGCCTACTACGTGGGCTACCTGCAGCCCAGGACCTTCCTGCTG | |
| | AAGTACAACGAGAACGGCACCATCACCGACGCCGTGGACTGCGCCC | |
| | TGGACCCCCTGAGCGAGACCAAGTGCACCCTGAAGAGCTTCACCGT | |
| | GGAGAAGGGCATCTACCAGACCAGCAACTTCAGGGTGCAGCCCACC | |
| | GAGAGCATCGTGAGGTTCCCCAACATCACCAACCTGTGCCCCTTCG | |
| | GCGAGGTGTTCAACGCCACCAGGTTCGCCAGCGTGTACGCCTGGAA | |
| | CAGGAAGAGGATCAGCAACTGCGTGGCCGACTACAGCGTGCTGTAC | |
| | AACAGCGCCAGCTTCAGCACCTTCAAGTGCTACGGCGTGAGCCCCA | |
| | CCAAGCTGAACGACCTGTGCTTCACCAACGTGTACGCCGACAGCTTC | |
| | GTGATCAGGGGCGACGAGGTGAGGCAGATCGCCCCCGGCCAGACC | |
| | GGCAAGATCGCCGACTACAACTACAAGCTGCCCGACGACTTCACCG | |
| | GCTGCGTGATCGCCTGGAACAGCAACAACCTGGACAGCAAGGTGGG | |
| | CGGCAACTACAACTACCTGTACAGGCTGTTCAGGAAGAGCAACCTGA | |
| | AGCCCTTCGAGAGGGACATCAGCACCGAGATCTACCAGGCCGGCAG | |
| | CACCCCCTGCAACGGCGTGGAGGGCTTCAACTGCTACTTCCCCCTG | |
| | CAGAGCTACGGCTTCCAGCCCACCAACGGCGTGGGCTACCAGCCCT | |
| | ACAGGGTGGTGGTGCTGAGCTTCGAGCTGCTGCACGCCCCCGCCAC | |
| | CGTGTGCGGCCCCAAGAAGAGCACCAACCTGGTGAAGAACAAGTGC | |
| | GTGAACTTCAACTTCAACGGCCTGACCGGCACCGGCGTGCTGACCG | |
| | AGAGCAACAAGAAGTTCCTGCCCTTCCAGCAGTTCGGCAGGGACAT | |
| | CGCCGACACCACCGACGCCGTGAGGGACCCCCAGACCCTGGAGAT | |
| | CCTGGACATCACCCCCTGCAGCTTCGGCGGCGTGAGCGTGATCACC | |
| | CCCGGCACCAACACCAGCAACCAGGTGGCCGTGCTGTACCAGGACG | |
| | TGAACTGCACCGAGGTGCCCGTGGCCATCCACGCCGACCAGCTGAC | |
| | CCCCACCTGGAGGGTGTACAGCACCGGCAGCAACGTGTTCCAGACC | |
| | AGGGCCGGCTGCCTGATCGGCGCCGAGCACGTGAACAACAGCTAC | |
| | GAGTGCGACATCCCCATCGGCGCCGGCATCTGCGCCAGCTACCAGA | |
| | CCCAGACCAACAGCCCCAGGAGGGCCAGGAGCGTGGCCAGCCAGA | |
| | GCATCATCGCCTACACCATGAGCCTGGGCGCCGAGAACAGCGTGGC | |
| | CTACAGCAACAACAGCATCGCCATCCCCACCAACTTCACCATCAGCG | |
| | TGACCACCGAGATCCTGCCCGTGAGCATGACCAAGACCAGCGTGGA | |
| | CTGCACCATGTACATCTGCGGCGACAGCACCGAGTGCAGCAACCTG | |
| | CTGCTGCAGTACGGCAGCTTCTGCACCCAGCTGAACAGGGCCCTGA | |
| | CCGGCATCGCCGTGGAGCAGGACAAGAACACCCAGGAGGTGTTCGC | |
| | CCAGGTGAAGCAGATCTACAAGACCCCCCCCATCAAGGACTTCGGC | |
| | GGCTTCAACTTCAGCCAGATCCTGCCCGACCCCAGCAAGCCCAGCA | |
| | AGAGGAGCTTCATCGAGGACCTGCTGTTCAACAAGGTGACCCTGGC | |
| | CGACGCCGGCTTCATCAAGCAGTACGGCGACTGCCTGGGCGACATC | |
| | GCCGCCAGGGACCTGATCTGCGCCCAGAAGTTCAACGGCCTGACCG | |
| | TGCTGCCCCCCCTGCTGACCGACGAGATGATCGCCCAGTACACCAG | |
| | CGCCCTGCTGGCCGGCACCATCACCAGCGGCTGGACCTTCGGCGC | |
| | CGGCGCCGCCCTGCAGATCCCCTTCGCCATGCAGATGGCCTACAGG | |
| | TTCAACGGCATCGGCGTGACCCAGAACGTGCTGTACGAGAACCAGA | |
| | AGCTGATCGCCAACCAGTTCAACAGCGCCATCGGCAAGATCCAGGA | |
| | CAGCCTGAGCAGCACCGCCAGCGCCCTGGGCAAGCTGCAGGACGT | |
| | GGTGAACCAGAACGCCCAGGCCCTGAACACCCTGGTGAAGCAGCTG | |
| | AGCAGCAACTTCGGCGCCATCAGCAGCGTGCTGAACGACATCCTGA | |
| | GCAGGCTGGACCCCCCCGAGGCCGAGGTGCAGATCGACAGGCTGA | |
| | TCACCGGCAGGCTGCAGAGCCTGCAGACCTACGTGACCCAGCAGCT | |
| | GATCAGGGCCGCCGAGATCAGGGCCAGCGCCAACCTGGCCGCCAC | |
| | CAAGATGAGCGAGTGCGTGCTGGGCCAGAGCAAGAGGGTGGACTTC | |
| | TGCGGCAAGGGCTACCACCTGATGAGCTTCCCCCAGAGCGCCCCCC | |
| | ACGGCGTGGTGTTCCTGCACGTGACCTACGTGCCCGCCCAGGAGAA | |
| | GAACTTCACCACCGCCCCCGCCATCTGCCACGACGGCAAGGCCCAC | |
| | TTCCCCAGGGAGGGCGTGTTCGTGAGCAACGGCACCCACTGGTTCG | |
| | TGACCCAGAGGAACTTCTACGAGCCCCAGATCATCACCACCGACAAC | |
| | ACCTTCGTGAGCGGCAACTGCGACGTGGTGATCGGCATCGTGAACA | |
| | ACACCGTGTACGACCCCCTGCAGCCCGAGCTGGACAGCTTCAAGGA | |
| | GGAGCTGGACAAGTACTTCAAGAACCACACCAGCCCCGACGTGGAC | |
| | CTGGGCGACATCAGCGGCATCAACGCCAGCGTGGTGAACATCCAGA | |
| | AGGAGATCGACAGGCTGAACGAGGTGGCCAAGAACCTGAACGAGAG | |
| | CCTGATCGACCTGCAGGAGCTGGGCAAGTACGAGCAGTACATCAAG | |
| | TGGCCCTGGTACATCTGGCTGGGCTTCATCGCCGGCCTGATCGCCA | |
| | TCGTGATGGTGACCATCATGCTGTGCTGCATGACCAGCTGCTGCAGC | |
| | TGCCTGAAGGGCTGCTGCAGCTGCGGCAGCTGCTGCAAGTTCGACG | |
| | AGGACGACAGCGAGCCCGTGCTGAAGGGCGTGAAGCTGCACTACAC | |
| | CGGAAGCGGAGCCACGAACTTCTCTCTGTTAAAGCAAGCAGGAGAT | |
| | [chemical structure] | |
| 5 | ATGTTCGTGTTCCTGGTGCTGCTGCCCCTGGTGAGCAGCCAGTGCG | 393 |
| leader | TGAACCTGACCACCAGGACCCAGCTGCCCCCCGCCTACACCAACAG | |
| sequence, | CTTCACCAGGGGCGTGTACTACCCCGACAAGGTGTTCAGGAGCAGC | |
| Spike | GTGCTGCACAGCACCCAGGACCTGTTCCTGCCCTTCTTCAGCAACGT | |
| glycoprotein | GACCTGGTTCCACGCCATCCACGTGAGCGGCACCAACGGCACCAAG | |
| (HexaPro- | AGGTTCGACAACCCCGTGCTGCCCTTCAACGACGGCGTGTACTTCG | |
| mutations), | CCAGCACCGAGAAGAGCAACATCATCAGGGGCTGGATCTTCGGCAC | |
| [chemical structure] | CACCCTGGACAGCAAGACCCAGAGCCTGCTGATCGTGAACAACGCC | |
| [chemical structure] | ACCAACGTGGTGATCAAGGTGTGCGAGTTCCAGTTCTGCAACGACCC | |
| | CTTCCTGGGCGTGTACTACCACAAGAACAACAAGAGCTGGATGGAGA | |
| | GCGAGTTCAGGGTGTACAGCAGCGCCAACAACTGCACCTTCGAGTA | |
| | CGTGAGCCAGCCCTTCCTGATGGACCTGGAGGGCAAGCAGGGCAAC | |
| | TTCAAGAACCTGAGGGAGTTCGTGTTCAAGAACATCGACGGCTACTT | |
| | CAAGATCTACAGCAAGCACACCCCCATCAACCTGGTGAGGGACCTG | |
| | CCCCAGGGCTTCAGCGCCCTGGAGCCCCTGGTGGACCTGCCCATCG | |
| | GCATCAACATCACCAGGTTCCAGACCCTGCTGGCCCTGCACAGGAG | |
| | CTACCTGACCCCCGGCGACAGCAGCAGCGGCTGGACCGCCGGCGC | |
| | CGCCGCCTACTACGTGGGCTACCTGCAGCCCAGGACCTTCCTGCTG | |
| | AAGTACAACGAGAACGGCACCATCACCGACGCCGTGGACTGCGCCC | |
| | TGGACCCCCTGAGCGAGACCAAGTGCACCCTGAAGAGCTTCACCGT | |
| | GGAGAAGGGCATCTACCAGACCAGCAACTTCAGGGTGCAGCCCACC | |
| | GAGAGCATCGTGAGGTTCCCCAACATCACCAACCTGTGCCCCTTCG | |
| | GCGAGGTGTTCAACGCCACCAGGTTCGCCAGCGTGTACGCCTGGAA | |
| | CAGGAAGAGGATCAGCAACTGCGTGGCCGACTACAGCGTGCTGTAC | |
| | AACAGCGCCAGCTTCAGCACCTTCAAGTGCTACGGCGTGAGCCCCA | |
| | CCAAGCTGAACGACCTGTGCTTCACCAACGTGTACGCCGACAGCTTC | |
| | GTGATCAGGGGCGACGAGGTGAGGCAGATCGCCCCCGGCCAGACC | |
| | GGCAAGATCGCCGACTACAACTACAAGCTGCCCGACGACTTCACCG | |
| | GCTGCGTGATCGCCTGGAACAGCAACAACCTGGACAGCAAGGTGGG | |
| | CGGCAACTACAACTACCTGTACAGGCTGTTCAGGAAGAGCAACCTGA | |
| | AGCCCTTCGAGAGGGACATCAGCACCGAGATCTACCAGGCCGGCAG | |
| | CACCCCCTGCAACGGCGTGGAGGGCTTCAACTGCTACTTCCCCCTG | |
| | CAGAGCTACGGCTTCCAGCCCACCAACGGCGTGGGCTACCAGCCCT | |
| | ACAGGGTGGTGGTGCTGAGCTTCGAGCTGCTGCACGCCCCCGCCAC | |
| | CGTGTGCGGCCCCAAGAAGAGCACCAACCTGGTGAAGAACAAGTGC | |
| | GTGAACTTCAACTTCAACGGCCTGACCGGCACCGGCGTGCTGACCG | |
| | AGAGCAACAAGAAGTTCCTGCCCTTCCAGCAGTTCGGCAGGGACAT | |
| | CGCCGACACCACCGACGCCGTGAGGGACCCCCAGACCCTGGAGAT | |
| | CCTGGACATCACCCCCTGCAGCTTCGGCGGCGTGAGCGTGATCACC | |
| | CCCGGCACCAACACCAGCAACCAGGTGGCCGTGCTGTACCAGGACG | |
| | TGAACTGCACCGAGGTGCCCGTGGCCATCCACGCCGACCAGCTGAC | |
| | CCCCACCTGGAGGGTGTACAGCACCGGCAGCAACGTGTTCCAGACC | |
| | AGGGCCGGCTGCCTGATCGGCGCCGAGCACGTGAACAACAGCTAC | |
| | GAGTGCGACATCCCCATCGGCGCCGGCATCTGCGCCAGCTACCAGA | |
| | CCCAGACCAACAGCCCCGGCAGCGCCAGCAGCGTGGCCAGCCAGA | |
| | GCATCATCGCCTACACCATGAGCCTGGGCGCCGAGAACAGCGTGGC | |
| | CTACAGCAACAACAGCATCGCCATCCCCACCAACTTCACCATCAGCG | |
| | TGACCACCGAGATCCTGCCCGTGAGCATGACCAAGACCAGCGTGGA | |
| | CTGCACCATGTACATCTGCGGCGACAGCACCGAGTGCAGCAACCTG | |
| | CTGCTGCAGTACGGCAGCTTCTGCACCCAGCTGAACAGGGCCCTGA | |
| | CCGGCATCGCCGTGGAGCAGGACAAGAACACCCAGGAGGTGTTCGC | |
| | CCAGGTGAAGCAGATCTACAAGACCCCCCCCATCAAGGACTTCGGC | |
| | GGCTTCAACTTCAGCCAGATCCTGCCCGACCCCAGCAAGCCCAGCA | |
| | AGAGGAGCCCCATCGAGGACCTGCTGTTCAACAAGGTGACCCTGGC | |
| | CGACGCCGGCTTCATCAAGCAGTACGGCGACTGCCTGGGCGACATC | |
| | GCCGCCAGGGACCTGATCTGCGCCCAGAAGTTCAACGGCCTGACCG | |
| | TGCTGCCCCCCCTGCTGACCGACGAGATGATCGCCCAGTACACCAG | |
| | CGCCCTGCTGGCCGGCACCATCACCAGCGGCTGGACCTTCGGCGC | |
| | CGGCCCCGCCCTGCAGATCCCCTTCCCCATGCAGATGGCCTACAGG | |
| | TTCAACGGCATCGGCGTGACCCAGAACGTGCTGTACGAGAACCAGA | |
| | AGCTGATCGCCAACCAGTTCAACAGCGCCATCGGCAAGATCCAGGA | |
| | CAGCCTGAGCAGCACCCCCAGCGCCCTGGGCAAGCTGCAGGACGT | |
| | GGTGAACCAGAACGCCCAGGCCCTGAACACCCTGGTGAAGCAGCTG | |
| | AGCAGCAACTTCGGCGCCATCAGCAGCGTGCTGAACGACATCCTGA | |
| | GCAGGCTGGACCCCCCCGAGGCCGAGGTGCAGATCGACAGGCTGA | |
| | TCACCGGCAGGCTGCAGAGCCTGCAGACCTACGTGACCCAGCAGCT | |
| | GATCAGGGCCGCCGAGATCAGGGCCAGCGCCAACCTGGCCGCCAC | |
| | CAAGATGAGCGAGTGCGTGCTGGGCCAGAGCAAGAGGGTGGACTTC | |
| | TGCGGCAAGGGCTACCACCTGATGAGCTTCCCCCAGAGCGCCCCCC | |
| | ACGGCGTGGTGTTCCTGCACGTGACCTACGTGCCCGCCCAGGAGAA | |
| | GAACTTCACCACCGCCCCCGCCATCTGCCACGACGGCAAGGCCCAC | |
| | TTCCCCAGGGAGGGCGTGTTCGTGAGCAACGGCACCCACTGGTTCG | |
| | TGACCCAGAGGAACTTCTACGAGCCCCAGATCATCACCACCGACAAC | |
| | ACCTTCGTGAGCGGCAACTGCGACGTGGTGATCGGCATCGTGAACA | |
| | ACACCGTGTACGACCCCCTGCAGCCCGAGCTGGACAGCTTCAAGGA | |
| | GGAGCTGGACAAGTACTTCAAGAACCACACCAGCCCCGACGTGGAC | |
| | CTGGGCGACATCAGCGGCATCAACGCCAGCGTGGTGAACATCCAGA | |
| | AGGAGATCGACAGGCTGAACGAGGTGGCCAAGAACCTGAACGAGAG | |
| | CCTGATCGACCTGCAGGAGCTGGGCAAGTACGAGCAGTACATCAAG | |
| | TGGCCCTGGTACATCTGGCTGGGCTTCATCGCCGGCCTGATCGCCA | |
| | TCGTGATGGTGACCATCATGCTGTGCTGCATGACCAGCTGCTGCAGC | |
| | TGCCTGAAGGGCTGCTGCAGCTGCGGCAGCTGCTGCAAGTTCGACG | |
| | AGGACGACAGCGAGCCCGTGCTGAAGGGCGTGAAGCTGCACTACAC | |
| | CGGAAGCGGAGCCACGAACTTCTCTCTGTTAAAGCAAGCAGGAGAT | |
| | [chemical structure] | |
| 6 | ATGTTCGTGTTCCTGGTGCTGCTGCCCCTGGTGAGCAGCCAGTGCG | 394 |
| leader | TGAACCTGACCACCAGGACCCAGCTGCCCCCCGCCTACACCAACAG | |
| sequence, | CTTCACCAGGGGCGTGTACTACCCCGACAAGGTGTTCAGGAGCAGC | |
| Spike | GTGCTGCACAGCACCCAGGACCTGTTCCTGCCCTTCTTCAGCAACGT | |
| glycoprotein | GACCTGGTTCCACGCCATCCACGTGAGCGGCACCAACGGCACCAAG | |
| (two proline | AGGTTCGACAACCCCGTGCTGCCCTTCAACGACGGCGTGTACTTCG | |
| substitutions) | CCAGCACCGAGAAGAGCAACATCATCAGGGGCTGGATCTTCGGCAC | |
| [chemical structure] | CACCCTGGACAGCAAGACCCAGAGCCTGCTGATCGTGAACAACGCC | |
| [chemical structure] | ACCAACGTGGTGATCAAGGTGTGCGAGTTCCAGTTCTGCAACGACCC | |
| | CTTCCTGGGCGTGTACTACCACAAGAACAACAAGAGCTGGATGGAGA | |
| | GCGAGTTCAGGGTGTACAGCAGCGCCAACAACTGCACCTTCGAGTA | |
| | CGTGAGCCAGCCCTTCCTGATGGACCTGGAGGGCAAGCAGGGCAAC | |
| | TTCAAGAACCTGAGGGAGTTCGTGTTCAAGAACATCGACGGCTACTT | |
| | CAAGATCTACAGCAAGCACACCCCCATCAACCTGGTGAGGGACCTG | |
| | CCCCAGGGCTTCAGCGCCCTGGAGCCCCTGGTGGACCTGCCCATCG | |
| | GCATCAACATCACCAGGTTCCAGACCCTGCTGGCCCTGCACAGGAG | |
| | CTACCTGACCCCCGGCGACAGCAGCAGCGGCTGGACCGCCGGCGC | |
| | CGCCGCCTACTACGTGGGCTACCTGCAGCCCAGGACCTTCCTGCTG | |
| | AAGTACAACGAGAACGGCACCATCACCGACGCCGTGGACTGCGCCC | |
| | TGGACCCCCTGAGCGAGACCAAGTGCACCCTGAAGAGCTTCACCGT | |
| | GGAGAAGGGCATCTACCAGACCAGCAACTTCAGGGTGCAGCCCACC | |
| | GAGAGCATCGTGAGGTTCCCCAACATCACCAACCTGTGCCCCTTCG | |
| | GCGAGGTGTTCAACGCCACCAGGTTCGCCAGCGTGTACGCCTGGAA | |
| | CAGGAAGAGGATCAGCAACTGCGTGGCCGACTACAGCGTGCTGTAC | |
| | AACAGCGCCAGCTTCAGCACCTTCAAGTGCTACGGCGTGAGCCCCA | |
| | CCAAGCTGAACGACCTGTGCTTCACCAACGTGTACGCCGACAGCTTC | |
| | GTGATCAGGGGCGACGAGGTGAGGCAGATCGCCCCCGGCCAGACC | |
| | GGCAAGATCGCCGACTACAACTACAAGCTGCCCGACGACTTCACCG | |
| | GCTGCGTGATCGCCTGGAACAGCAACAACCTGGACAGCAAGGTGGG | |
| | CGGCAACTACAACTACCTGTACAGGCTGTTCAGGAAGAGCAACCTGA | |
| | AGCCCTTCGAGAGGGACATCAGCACCGAGATCTACCAGGCCGGCAG | |
| | CACCCCCTGCAACGGCGTGGAGGGCTTCAACTGCTACTTCCCCCTG | |
| | CAGAGCTACGGCTTCCAGCCCACCAACGGCGTGGGCTACCAGCCCT | |
| | ACAGGGTGGTGGTGCTGAGCTTCGAGCTGCTGCACGCCCCCGCCAC | |
| | CGTGTGCGGCCCCAAGAAGAGCACCAACCTGGTGAAGAACAAGTGC | |
| | GTGAACTTCAACTTCAACGGCCTGACCGGCACCGGCGTGCTGACCG | |
| | AGAGCAACAAGAAGTTCCTGCCCTTCCAGCAGTTCGGCAGGGACAT | |
| | CGCCGACACCACCGACGCCGTGAGGGACCCCCAGACCCTGGAGAT | |
| | CCTGGACATCACCCCCTGCAGCTTCGGCGGCGTGAGCGTGATCACC | |
| | CCCGGCACCAACACCAGCAACCAGGTGGCCGTGCTGTACCAGGACG | |
| | TGAACTGCACCGAGGTGCCCGTGGCCATCCACGCCGACCAGCTGAC | |
| | CCCCACCTGGAGGGTGTACAGCACCGGCAGCAACGTGTTCCAGACC | |
| | AGGGCCGGCTGCCTGATCGGCGCCGAGCACGTGAACAACAGCTAC | |
| | GAGTGCGACATCCCCATCGGCGCCGGCATCTGCGCCAGCTACCAGA | |
| | CCCAGACCAACAGCCCCAGGAGGGCCAGGAGCGTGGCCAGCCAGA | |
| | GCATCATCGCCTACACCATGAGCCTGGGCGCCGAGAACAGCGTGGC | |
| | CTACAGCAACAACAGCATCGCCATCCCCACCAACTTCACCATCAGCG | |
| | TGACCACCGAGATCCTGCCCGTGAGCATGACCAAGACCAGCGTGGA | |
| | CTGCACCATGTACATCTGCGGCGACAGCACCGAGTGCAGCAACCTG | |
| | CTGCTGCAGTACGGCAGCTTCTGCACCCAGCTGAACAGGGCCCTGA | |
| | CCGGCATCGCCGTGGAGCAGGACAAGAACACCCAGGAGGTGTTCGC | |
| | CCAGGTGAAGCAGATCTACAAGACCCCCCCCATCAAGGACTTCGGC | |
| | GGCTTCAACTTCAGCCAGATCCTGCCCGACCCCAGCAAGCCCAGCA | |
| | AGAGGAGCTTCATCGAGGACCTGCTGTTCAACAAGGTGACCCTGGC | |
| | CGACGCCGGCTTCATCAAGCAGTACGGCGACTGCCTGGGCGACATC | |
| | GCCGCCAGGGACCTGATCTGCGCCCAGAAGTTCAACGGCCTGACCG | |
| | TGCTGCCCCCCCTGCTGACCGACGAGATGATCGCCCAGTACACCAG | |
| | CGCCCTGCTGGCCGGCACCATCACCAGCGGCTGGACCTTCGGCGC | |
| | CGGCGCCGCCCTGCAGATCCCCTTCGCCATGCAGATGGCCTACAGG | |
| | TTCAACGGCATCGGCGTGACCCAGAACGTGCTGTACGAGAACCAGA | |
| | AGCTGATCGCCAACCAGTTCAACAGCGCCATCGGCAAGATCCAGGA | |
| | CAGCCTGAGCAGCACCGCCAGCGCCCTGGGCAAGCTGCAGGACGT | |
| | GGTGAACCAGAACGCCCAGGCCCTGAACACCCTGGTGAAGCAGCTG | |
| | AGCAGCAACTTCGGCGCCATCAGCAGCGTGCTGAACGACATCCTGA | |
| | GCAGGCTGGACCCCCCCGAGGCCGAGGTGCAGATCGACAGGCTGA | |
| | TCACCGGCAGGCTGCAGAGCCTGCAGACCTACGTGACCCAGCAGCT | |
| | GATCAGGGCCGCCGAGATCAGGGCCAGCGCCAACCTGGCCGCCAC | |
| | CAAGATGAGCGAGTGCGTGCTGGGCCAGAGCAAGAGGGTGGACTTC | |
| | TGCGGCAAGGGCTACCACCTGATGAGCTTCCCCCAGAGCGCCCCCC | |
| | ACGGCGTGGTGTTCCTGCACGTGACCTACGTGCCCGCCCAGGAGAA | |
| | GAACTTCACCACCGCCCCCGCCATCTGCCACGACGGCAAGGCCCAC | |
| | TTCCCCAGGGAGGGCGTGTTCGTGAGCAACGGCACCCACTGGTTCG | |
| | TGACCCAGAGGAACTTCTACGAGCCCCAGATCATCACCACCGACAAC | |
| | ACCTTCGTGAGCGGCAACTGCGACGTGGTGATCGGCATCGTGAACA | |
| | ACACCGTGTACGACCCCCTGCAGCCCGAGCTGGACAGCTTCAAGGA | |
| | GGAGCTGGACAAGTACTTCAAGAACCACACCAGCCCCGACGTGGAC | |
| | CTGGGCGACATCAGCGGCATCAACGCCAGCGTGGTGAACATCCAGA | |
| | AGGAGATCGACAGGCTGAACGAGGTGGCCAAGAACCTGAACGAGAG | |
| | CCTGATCGACCTGCAGGAGCTGGGCAAGTACGAGCAGTACATCAAG | |
| | TGGCCCTGGTACATCTGGCTGGGCTTCATCGCCGGCCTGATCGCCA | |
| | TCGTGATGGTGACCATCATGCTGTGCTGCATGACCAGCTGCTGCAGC | |
| | TGCCTGAAGGGCTGCTGCAGCTGCGGCAGCTGCTGCAAGTTCGACG | |
| | AGGACGACAGCGAGCCCGTGCTGAAGGGCGTGAAGCTGCACTACAC | |
| | CGGAAGCGGAGCCACGAACTTCTCTCTGTTAAAGCAAGCAGGAGAT | |
| | [chemical structure] | |
| Pan-CoV-Flu | TAGTTATTAATAGTAATCAATTACGGGGTCATTAGTTCATAGCCCATAT | 395 |
| Vaccine #7 | ATGGAGTTCCGCGTTACATAACTTACGGTAAATGGCCCGCCTGGCTG | |
| CoV- Omicron | ACCGCCCAACGACCCCCGCCCATTGACGTCAATAATGACGTATGTTC | |
| BA.2 | CCATAGTAACGCCAATAGGGACTTTCCATTGACGTCAATGGGTGGAG | |
| Spike(HexaPro)- | TATTTACGGTAAACTGCCCACTTGGCAGTACATCAAGTGTATCATATG | |
| Influenza (HA) | CCAAGTACGCCCCCTATTGACGTCAATGACGGTAAATGGCCCGCCTG | |
| | GCATTATGCCCAGTACATGACCTTATGGGACTTTCCTACTTGGCAGTA | |
| | CATCTACGTATTAGTCATCGCTATTACCATGGTGATGCGGTTTTGGCA | |
| | GTACATCAATGGGCGTGGATAGCGGTTTGACTCACGGGGATTTCCAA | |
| | GTCTCCACCCCATTGACGTCAATGGGAGTTTGTTTTGGCACCAAAAT | |
| | CAACGGGACTTTCCAAAATGTCGTAACAACTCCGCCCCATTGACGCA | |
| | AATGGGCGGTAGGCGTGTACGGTGGGAGGTCTATATAAGCAGAGCT | |
| | GGTTTAGTGAACCGTCAGATCGAGAATAAACTAGTATTCTTCTGGTCC | |
| | CCACAGACTCAGAGAGAACCCGCCACCATGTTCGTGTTCCTGGTGCT | |
| | GCTGCCCCTGGTGAGCAGCCAGTGCGTGAACCTGATCACCAGGACC | |
| | CAGAGCTACACCAACAGCTTCACCAGGGGCGTGTACTACCCCGACA | |
| | AGGTGTTCAGGAGCAGCGTGCTGCACAGCACCCAGGACCTGTTCCT | |
| | GCCCTTCTTCAGCAACGTGACCTGGTTCCACGCCATCCACGTGAGC | |
| | GGCACCAACGGCACCAAGAGGTTCGACAACCCCGTGCTGCCCTTCA | |
| | ACGACGGCGTGTACTTCGCCAGCACCGAGAAGAGCAACATCATCAG | |
| | GGGCTGGATCTTCGGCACCACCCTGGACAGCAAGACCCAGAGCCTG | |
| | CTGATCGTGAACAACGCCACCAACGTGGTGATCAAGGTGTGCGAGTT | |
| | CCAGTTCTGCAACGACCCCTTCCTGGACGTGTACTACCACAAGAACA | |
| | ACAAGAGCTGGATGGAGAGCGAGTTCAGGGTGTACAGCAGCGCCAA | |
| | CAACTGCACCTTCGAGTACGTGAGCCAGCCCTTCCTGATGGACCTG | |
| | GAGGGCAAGCAGGGCAACTTCAAGAACCTGAGGGAGTTCGTGTTCA | |
| | AGAACATCGACGGCTACTTCAAGATCTACAGCAAGCACACCCCCATC | |
| | AACCTGGGCAGGGACCTGCCCCAGGGCTTCAGCGCCCTGGAGCCC | |
| | CTGGTGGACCTGCCCATCGGCATCAACATCACCAGGTTCCAGACCCT | |
| | GCTGGCCCTGCACAGGAGCTACCTGACCCCCGGCGACAGCAGCAG | |
| | CGGCTGGACCGCCGGCGCCGCCGCCTACTACGTGGGCTACCTGCA | |
| | GCCCAGGACCTTCCTGCTGAAGTACAACGAGAACGGCACCATCACC | |
| | GACGCCGTGGACTGCGCCCTGGACCCCCTGAGCGAGACCAAGTGC | |
| | ACCCTGAAGAGCTTCACCGTGGAGAAGGGCATCTACCAGACCAGCA | |
| | ACTTCAGGGTGCAGCCCACCGAGAGCATCGTGAGGTTCCCCAACAT | |
| | CACCAACCTGTGCCCCTTCGACGAGGTGTTCAACGCCACCAGGTTC | |
| | GCCAGCGTGTACGCCTGGAACAGGAAGAGGATCAGCAACTGCGTGG | |
| | CCGACTACAGCGTGCTGTACAACTTCGCCCCCTTCTTCGCCTTCAAG | |
| | TGCTACGGCGTGAGCCCCACCAAGCTGAACGACCTGTGCTTCACCA | |
| | ACGTGTACGCCGACAGCTTCGTGATCAGGGGCAACGAGGTGAGCCA | |
| | GATCGCCCCCGGCCAGACCGGCAACATCGCCGACTACAACTACAAG | |
| | CTGCCCGACGACTTCACCGGCTGCGTGATCGCCTGGAACAGCAACA | |
| | AGCTGGACAGCAAGGTGGGCGGCAACTACAACTACCTGTACAGGCT | |
| | GTTCAGGAAGAGCAACCTGAAGCCCTTCGAGAGGGACATCAGCACC | |
| | GAGATCTACCAGGCCGGCAACAAGCCCTGCAACGGCGTGGCCGGCT | |
| | TCAACTGCTACTTCCCCCTGAGGAGCTACGGCTTCAGGCCCACCTAC | |
| | GGCGTGGGCCACCAGCCCTACAGGGTGGTGGTGCTGAGCTTCGAG | |
| | CTGCTGCACGCCCCCGCCACCGTGTGCGGCCCCAAGAAGAGCACCA | |
| | ACCTGGTGAAGAACAAGTGCGTGAACTTCAACTTCAACGGCCTGACC | |
| | GGCACCGGCGTGCTGACCGAGAGCAACAAGAAGTTCCTGCCCTTCC | |
| | AGCAGTTCGGCAGGGACATCGCCGACACCACCGACGCCGTGAGGG | |
| | ACCCCCAGACCCTGGAGATCCTGGACATCACCCCCTGCAGCTTCGG | |
| | CGGCGTGAGCGTGATCACCCCCGGCACCAACACCAGCAACCAGGTG | |
| | GCCGTGCTGTACCAGGGCGTGAACTGCACCGAGGTGCCCGTGGCC | |
| | ATCCACGCCGACCAGCTGACCCCCACCTGGAGGGTGTACAGCACCG | |
| | GCAGCAACGTGTTCCAGACCAGGGCCGGCTGCCTGATCGGCGCCG | |
| | AGTACGTGAACAACAGCTACGAGTGCGACATCCCCATCGGCGCCGG | |
| | CATCTGCGCCAGCTACCAGACCCAGACCAAGAGCCACCAGCAGGCC | |
| | CAGAGCGTGGCCAGCCAGAGCATCATCGCCTACACCATGAGCCTGG | |
| | GCGCCGAGAACAGCGTGGCCTACAGCAACAACAGCATCGCCATCCC | |
| | CACCAACTTCACCATCAGCGTGACCACCGAGATCCTGCCCGTGAGC | |
| | ATGACCAAGACCAGCGTGGACTGCACCATGTACATCTGCGGCGACA | |
| | GCACCGAGTGCAGCAACCTGCTGCTGCAGTACGGCAGCTTCTGCAC | |
| | CCAGCTGAAGAGGGCCCTGACCGGCATCGCCGTGGAGCAGGACAA | |
| | GAACACCCAGGAGGTGTTCGCCCAGGTGAAGCAGATCTACAAGACC | |
| | CCCCCCATCAAGTACTTCGGCGGCTTCAACTTCAGCCAGATCCTGCC | |
| | CGACCCCAGCAAGCCCAGCAAGAGGAGCCCCATCGAGGACCTGCTG | |
| | TTCAACAAGGTGACCCTGGCCGACGCCGGCTTCATCAAGCAGTACG | |
| | GCGACTGCCTGGGCGACATCGCCGCCAGGGACCTGATCTGCGCCC | |
| | AGAAGTTCAACGGCCTGACCGTGCTGCCCCCCCTGCTGACCGACGA | |
| | GATGATCGCCCAGTACACCAGCGCCCTGCTGGCCGGCACCATCACC | |
| | AGCGGCTGGACCTTCGGCGCCGGCCCCGCCCTGCAGATCCCCTTCC | |
| | CCATGCAGATGGCCTACAGGTTCAACGGCATCGGCGTGACCCAGAA | |
| | CGTGCTGTACGAGAACCAGAAGCTGATCGCCAACCAGTTCAACAGC | |
| | GCCATCGGCAAGATCCAGGACAGCCTGAGCAGCACCCCCAGCGCCC | |
| | TGGGCAAGCTGCAGGACGTGGTGAACCACAACGCCCAGGCCCTGAA | |
| | CACCCTGGTGAAGCAGCTGAGCAGCAAGTTCGGCGCCATCAGCAGC | |
| | GTGCTGAACGACATCCTGAGCAGGCTGGACCCCCCCGAGGCCGAG | |
| | GTGCAGATCGACAGGCTGATCACCGGCAGGCTGCAGAGCCTGCAGA | |
| | CCTACGTGACCCAGCAGCTGATCAGGGCCGCCGAGATCAGGGCCAG | |
| | CGCCAACCTGGCCGCCACCAAGATGAGCGAGTGCGTGCTGGGCCA | |
| | GAGCAAGAGGGTGGACTTCTGCGGCAAGGGCTACCACCTGATGAGC | |
| | TTCCCCCAGAGCGCCCCCCACGGCGTGGTGTTCCTGCACGTGACCT | |
| | ACGTGCCCGCCCAGGAGAAGAACTTCACCACCGCCCCCGCCATCTG | |
| | CCACGACGGCAAGGCCCACTTCCCCAGGGAGGGCGTGTTCGTGAG | |
| | CAACGGCACCCACTGGTTCGTGACCCAGAGGAACTTCTACGAGCCC | |
| | CAGATCATCACCACCGACAACACCTTCGTGAGCGGCAACTGCGACG | |
| | TGGTGATCGGCATCGTGAACAACACCGTGTACGACCCCCTGCAGCC | |
| | CGAGCTGGACAGCTTCAAGGAGGAGCTGGACAAGTACTTCAAGAAC | |
| | CACACCAGCCCCGACGTGGACCTGGGCGACATCAGCGGCATCAACG | |
| | CCAGCGTGGTGAACATCCAGAAGGAGATCGACAGGCTGAACGAGGT | |
| | GGCCAAGAACCTGAACGAGAGCCTGATCGACCTGCAGGAGCTGGGC | |
| | AAGTACGAGCAGTACATCAAGTGGCCCTGGTACATCTGGCTGGGCTT | |
| | CATCGCCGGCCTGATCGCCATCGTGATGGTGACCATCATGCTGTGCT | |
| | GCATGACCAGCTGCTGCAGCTGCCTGAAGGGCTGCTGCAGCTGCGG | |
| | CAGCTGCTGCAAGTTCGACGAGGACGACAGCGAGCCCGTGCTGAAG | |
| | GGCGTGAAGCTGCACTACACCGGAAGCGGAGCCACGAACTTCTCTC | |
| | [chemical structure] | |
| | [chemical structure] | |
| | [chemical structure] | |
| | ACTTCTCTCTGTTAAAGCAAGCAGGAGATGTTGAAGAAAACCCCGGG | |
| | CCTTTCGGAGCTATTGCTGCTTTCTTGGAAGGAGGATGGGAAGGAAT | |
| | GATTGCAGGTTGGCACGGATACACATCTCATGGAGCACATGGAGTAG | |
| | CAGTGGCAGCAGACCTTAAGAGTACCCATGATGACTCGAGCTGGTAC | |
| | TGCATGCACGCAATGCTAGCTGCCCCTTTCCCGTCCTGGGTACCCC | |
| | GAGTCTCCCCCGACCTCGGGTCCCAGGTATGCTCCCACCTCCACCT | |
| | GCCCCACTCACCACCTCTGCTAGTTCCAGACACCTCCCAAGCACGCA | |
| | GCAATGCAGCTCAAAACGCTTAGCCTAGCCACACCCCCACGGGAAA | |
| | CAGCAGTGATTAACCTTTAGCAATAAACGAAAGTTTAACTAAGCTATA | |
| | CTAACCCCAGGGTTGGTCAATTTCGTGCCAGCCACACCCTGGAGCTA | |
| | GCAAAAAAAA | |
| Pan-CoV-Flu | TAGTTATTAATAGTAATCAATTACGGGGTCATTAGTTCATAGCCCATAT | 396 |
| Vaccine #8 | ATGGAGTTCCGCGTTACATAACTTACGGTAAATGGCCCGCCTGGCTG | |
| CoV-Omicron | ACCGCCCAACGACCCCCGCCCATTGACGTCAATAATGACGTATGTTC | |
| BA.2 Spike(2 | CCATAGTAACGCCAATAGGGACTTTCCATTGACGTCAATGGGTGGAG | |
| proline | TATTTACGGTAAACTGCCCACTTGGCAGTACATCAAGTGTATCATATG | |
| substitution)- | CCAAGTACGCCCCCTATTGACGTCAATGACGGTAAATGGCCCGCCTG | |
| Influenza (HA) | GCATTATGCCCAGTACATGACCTTATGGGACTTTCCTACTTGGCAGTA | |
| | CATCTACGTATTAGTCATCGCTATTACCATGGTGATGCGGTTTTGGCA | |
| | GTACATCAATGGGCGTGGATAGCGGTTTGACTCACGGGGATTTCCAA | |
| | GTCTCCACCCCATTGACGTCAATGGGAGTTTGTTTTGGCACCAAAAT | |
| | CAACGGGACTTTCCAAAATGTCGTAACAACTCCGCCCCATTGACGCA | |
| | AATGGGCGGTAGGCGTGTACGGTGGGAGGTCTATATAAGCAGAGCT | |
| | GGTTTAGTGAACCGTCAGATCGAGAATAAACTAGTATTCTTCTGGTCC | |
| | CCACAGACTCAGAGAGAACCCGCCACCATGTTCGTGTTCCTGGTGCT | |
| | GCTGCCCCTGGTGAGCAGCCAGTGCGTGAACCTGATCACCAGGACC | |
| | CAGAGCTACACCAACAGCTTCACCAGGGGCGTGTACTACCCCGACA | |
| | AGGTGTTCAGGAGCAGCGTGCTGCACAGCACCCAGGACCTGTTCCT | |
| | GCCCTTCTTCAGCAACGTGACCTGGTTCCACGCCATCCACGTGAGC | |
| | GGCACCAACGGCACCAAGAGGTTCGACAACCCCGTGCTGCCCTTCA | |
| | ACGACGGCGTGTACTTCGCCAGCACCGAGAAGAGCAACATCATCAG | |
| | GGGCTGGATCTTCGGCACCACCCTGGACAGCAAGACCCAGAGCCTG | |
| | CTGATCGTGAACAACGCCACCAACGTGGTGATCAAGGTGTGCGAGTT | |
| | CCAGTTCTGCAACGACCCCTTCCTGGACGTGTACTACCACAAGAACA | |
| | ACAAGAGCTGGATGGAGAGCGAGTTCAGGGTGTACAGCAGCGCCAA | |
| | CAACTGCACCTTCGAGTACGTGAGCCAGCCCTTCCTGATGGACCTG | |
| | GAGGGCAAGCAGGGCAACTTCAAGAACCTGAGGGAGTTCGTGTTCA | |
| | AGAACATCGACGGCTACTTCAAGATCTACAGCAAGCACACCCCCATC | |
| | AACCTGGGCAGGGACCTGCCCCAGGGCTTCAGCGCCCTGGAGCCC | |
| | CTGGTGGACCTGCCCATCGGCATCAACATCACCAGGTTCCAGACCCT | |
| | GCTGGCCCTGCACAGGAGCTACCTGACCCCCGGCGACAGCAGCAG | |
| | CGGCTGGACCGCCGGCGCCGCCGCCTACTACGTGGGCTACCTGCA | |
| | GCCCAGGACCTTCCTGCTGAAGTACAACGAGAACGGCACCATCACC | |
| | GACGCCGTGGACTGCGCCCTGGACCCCCTGAGCGAGACCAAGTGC | |
| | ACCCTGAAGAGCTTCACCGTGGAGAAGGGCATCTACCAGACCAGCA | |
| | ACTTCAGGGTGCAGCCCACCGAGAGCATCGTGAGGTTCCCCAACAT | |
| | CACCAACCTGTGCCCCTTCGACGAGGTGTTCAACGCCACCAGGTTC | |
| | GCCAGCGTGTACGCCTGGAACAGGAAGAGGATCAGCAACTGCGTGG | |
| | CCGACTACAGCGTGCTGTACAACTTCGCCCCCTTCTTCGCCTTCAAG | |
| | TGCTACGGCGTGAGCCCCACCAAGCTGAACGACCTGTGCTTCACCA | |
| | ACGTGTACGCCGACAGCTTCGTGATCAGGGGCAACGAGGTGAGCCA | |
| | GATCGCCCCCGGCCAGACCGGCAACATCGCCGACTACAACTACAAG | |
| | CTGCCCGACGACTTCACCGGCTGCGTGATCGCCTGGAACAGCAACA | |
| | AGCTGGACAGCAAGGTGGGCGGCAACTACAACTACCTGTACAGGCT | |
| | GTTCAGGAAGAGCAACCTGAAGCCCTTCGAGAGGGACATCAGCACC | |
| | GAGATCTACCAGGCCGGCAACAAGCCCTGCAACGGCGTGGCCGGCT | |
| | TCAACTGCTACTTCCCCCTGAGGAGCTACGGCTTCAGGCCCACCTAC | |
| | GGCGTGGGCCACCAGCCCTACAGGGTGGTGGTGCTGAGCTTCGAG | |
| | CTGCTGCACGCCCCCGCCACCGTGTGCGGCCCCAAGAAGAGCACCA | |
| | ACCTGGTGAAGAACAAGTGCGTGAACTTCAACTTCAACGGCCTGACC | |
| | GGCACCGGCGTGCTGACCGAGAGCAACAAGAAGTTCCTGCCCTTCC | |
| | AGCAGTTCGGCAGGGACATCGCCGACACCACCGACGCCGTGAGGG | |
| | ACCCCCAGACCCTGGAGATCCTGGACATCACCCCCTGCAGCTTCGG | |
| | CGGCGTGAGCGTGATCACCCCCGGCACCAACACCAGCAACCAGGTG | |
| | GCCGTGCTGTACCAGGGCGTGAACTGCACCGAGGTGCCCGTGGCC | |
| | ATCCACGCCGACCAGCTGACCCCCACCTGGAGGGTGTACAGCACCG | |
| | GCAGCAACGTGTTCCAGACCAGGGCCGGCTGCCTGATCGGCGCCG | |
| | AGTACGTGAACAACAGCTACGAGTGCGACATCCCCATCGGCGCCGG | |
| | CATCTGCGCCAGCTACCAGACCCAGACCAAGAGCCACCAGCAGGCC | |
| | CAGAGCGTGGCCAGCCAGAGCATCATCGCCTACACCATGAGCCTGG | |
| | GCGCCGAGAACAGCGTGGCCTACAGCAACAACAGCATCGCCATCCC | |
| | CACCAACTTCACCATCAGCGTGACCACCGAGATCCTGCCCGTGAGC | |
| | ATGACCAAGACCAGCGTGGACTGCACCATGTACATCTGCGGCGACA | |
| | GCACCGAGTGCAGCAACCTGCTGCTGCAGTACGGCAGCTTCTGCAC | |
| | CCAGCTGAAGAGGGCCCTGACCGGCATCGCCGTGGAGCAGGACAA | |
| | GAACACCCAGGAGGTGTTCGCCCAGGTGAAGCAGATCTACAAGACC | |
| | CCCCCCATCAAGTACTTCGGCGGCTTCAACTTCAGCCAGATCCTGCC | |
| | CGACCCCAGCAAGCCCAGCAAGAGGAGCTTCATCGAGGACCTGCTG | |
| | TTCAACAAGGTGACCCTGGCCGACGCCGGCTTCATCAAGCAGTACG | |
| | GCGACTGCCTGGGCGACATCGCCGCCAGGGACCTGATCTGCGCCC | |
| | AGAAGTTCAACGGCCTGACCGTGCTGCCCCCCCTGCTGACCGACGA | |
| | GATGATCGCCCAGTACACCAGCGCCCTGCTGGCCGGCACCATCACC | |
| | AGCGGCTGGACCTTCGGCGCCGGCGCCGCCCTGCAGATCCCCTTC | |
| | GCCATGCAGATGGCCTACAGGTTCAACGGCATCGGCGTGACCCAGA | |
| | ACGTGCTGTACGAGAACCAGAAGCTGATCGCCAACCAGTTCAACAGC | |
| | GCCATCGGCAAGATCCAGGACAGCCTGAGCAGCACCGCCAGCGCC | |
| | CTGGGCAAGCTGCAGGACGTGGTGAACCACAACGCCCAGGCCCTGA | |
| | ACACCCTGGTGAAGCAGCTGAGCAGCAAGTTCGGCGCCATCAGCAG | |
| | CGTGCTGAACGACATCCTGAGCAGGCTGGACCCCCCCGAGGCCGA | |
| | GGTGCAGATCGACAGGCTGATCACCGGCAGGCTGCAGAGCCTGCAG | |
| | ACCTACGTGACCCAGCAGCTGATCAGGGCCGCCGAGATCAGGGCCA | |
| | GCGCCAACCTGGCCGCCACCAAGATGAGCGAGTGCGTGCTGGGCC | |
| | AGAGCAAGAGGGTGGACTTCTGCGGCAAGGGCTACCACCTGATGAG | |
| | CTTCCCCCAGAGCGCCCCCCACGGCGTGGTGTTCCTGCACGTGACC | |
| | TACGTGCCCGCCCAGGAGAAGAACTTCACCACCGCCCCCGCCATCT | |
| | GCCACGACGGCAAGGCCCACTTCCCCAGGGAGGGCGTGTTCGTGA | |
| | GCAACGGCACCCACTGGTTCGTGACCCAGAGGAACTTCTACGAGCC | |
| | CCAGATCATCACCACCGACAACACCTTCGTGAGCGGCAACTGCGAC | |
| | GTGGTGATCGGCATCGTGAACAACACCGTGTACGACCCCCTGCAGC | |
| | CCGAGCTGGACAGCTTCAAGGAGGAGCTGGACAAGTACTTCAAGAA | |
| | CCACACCAGCCCCGACGTGGACCTGGGCGACATCAGCGGCATCAAC | |
| | GCCAGCGTGGTGAACATCCAGAAGGAGATCGACAGGCTGAACGAGG | |
| | TGGCCAAGAACCTGAACGAGAGCCTGATCGACCTGCAGGAGCTGGG | |
| | CAAGTACGAGCAGTACATCAAGTGGCCCTGGTACATCTGGCTGGGC | |
| | TTCATCGCCGGCCTGATCGCCATCGTGATGGTGACCATCATGCTGTG | |
| | CTGCATGACCAGCTGCTGCAGCTGCCTGAAGGGCTGCTGCAGCTGC | |
| | GGCAGCTGCTGCAAGTTCGACGAGGACGACAGCGAGCCCGTGCTGA | |
| | AGGGCGTGAAGCTGCACTACACCGGAAGCGGAGCCACGAACTTCTC | |
| | TCTGTTAAAGCAAGCAGGAGATGTTGAAGAAAACCCCGGGCCTATGA | |
| | AGGCAATACTAGTAGTTCTGCTATATACATTTGCAACCGCAAATGCAG | |
| | ACACATTATGTATAGGTTATCATGCGAACAACTCAACAGACACTGTAG | |
| | ACACAGTACTAGAAAAGAATGTAACAGTAACACACTCTGTTAACCTTC | |
| | TAGAAGACAAGCATAACGGGAAACTATGCAAACTAAGAGGGGTAGCC | |
| | CCATTGCATTTGGGTAAATGTAACATTGCTGGCTGGATCCTGGGAAA | |
| | TCCAGAGTGTGAATCACTCTCCACAGCAAGCTCATGGTCCTACATTG | |
| | TGGAAACATCTAGTTCAGACAATGGAACGTGTTACCCAGGAGATTTC | |
| | ATCGATTATGAGGAGCTAAGAGAGCAATTGAGCTCAGTGTCATCATTT | |
| | GAAAGGTTTGAGATATTCCCCAAGACAAGTTCATGGCCCAATCATGA | |
| | CTCGAACAAAGGTGTAACGACAGCATGTCCTCATGCTGGAGCAAAAA | |
| | GCTTCTACAAAAATTTAATATGGCTAGTTAAAAAAGGAAATTCATACC | |
| | CAAAGCTCAGCAAATCCTACATTAATGATAAAGGGAAAGAAGTCCTC | |
| | GTGCTATGGGGCATTCACCATCCACCTACTAGTGCTGACCAACAAAG | |
| | TCTCTATCAGAATGCAGATGCATATGTTTTTGTGGGGACATCAAGATA | |
| | CAGCAAGAAGTTCAAGCCGGAAATAGCAATAAGGCCCAAAGTGAGG | |
| | GATCAAGAAGGGAGAATGAACTATTACTGGACACTAGTAGAGCCGGG | |
| | AGACAAAATAACATTCGAAGCAACTGGAAATCTAGTGGTACCGAGAT | |
| | ATGCATTCGCAATGGAAAGAAATGCTGGATCTGGTATTATCATTTCAG | |
| | ATACACCAGTCCACGATTGCAATACAACTTGTCAGACACCCAAGGGT | |
| | GCTATAAACACCAGCCTCCCATTTCAGAACATACATCCGATCACAATT | |
| | GGAAAATGTCCAAAATATGTAAAAAGCACAAAATTGAGACTGGCCAC | |
| | AGGATTGAGGAATGTCCCGTCCATTCAATCTAGAGGCCTATTTGGGG | |
| | CCATTGCCGGTTTCATTGAAGGGGGGTGGACAGGGATGGTAGATGG | |
| | ATGGTACGGTTATCACCATCAAAATGAGCAGGGGTCAGGATATGCAG | |
| | CCGACCTGAAGAGCACACAGAATGCCATTGACGAGATTACTAACAAA | |
| | GTAAACTCTGTTATTGAAAAAATGAATACACAGTTCACAGCAGTAGGT | |
| | AAAGAGTTCAACCACCTGGAAAAAAGAATAGAGAATTTAAATAAAAAA | |
| | GTTGATGATGGTTTCCTGGACATTTGGACTTACAATGCCGAACTGTTG | |
| | GTTCTATTGGAAAATGAAAGAACTTTGGACTACCACGATTCAAAGGTG | |
| | AAGAACTTATATGAAAAGGTAAGAAGCCAGTTAAAAAACAATGCCAAG | |
| | GAAATTGGAAACGGCTGCTTTGAATTTTACCACAAATGTGATAACACG | |
| | TGCATGGAAAGTGTCAAAAATGGGACTTATGACTACCCAAAATACTCA | |
| | GAGGAAGCAAAATTAAACAGAGAAGAAATAGATGGGGTAAAGCTGGA | |
| | ATCAACAAGGATTTACCAGATTTTGGCGATCTATTCAACCGTCGCCAG | |
| | TTCATTGGTACTGGTAGTCTCCCTGGGGGCAATCAGTTTCTGGATGT | |
| | GCTCTAATGGGTCTCTACAGTGTAGAATATGTATTTAAGGAAGCGGA | |
| | GCCACGAACTTCTCTCTGTTAAAGCAAGCAGGAGATGTTGAAGAAAA | |
| | CCCCGGGCCTAGCAAAAGCAGGGGATAATTCTATTAACCATGAAGAC | |
| | TATCATTGCTTTGAGCTACATTCTATGTCTGGTTTTCGCTCAAAAACTT | |
| | CCTGGAAATGACAATAGCACTGCAACGCTGTGCCTTGGGCACCATGC | |
| | AGTACCAAACGGAACGATAGTGAAAACAATCACGAATGACCAAATTG | |
| | AAGTTACTAATGCTACTGAGCTGGTTCAGAATTCCTCAATAGGTGAAA | |
| | TATGCGACAGTCCTCATCAGATCCTTGATGGAGAAAACTGCACACTA | |
| | ATAGATGCTCTATTGGGAGACCCTCAGTGTGATGGCTTTCAAAATAA | |
| | GAAATGGGACCTTTTTGTTGAAGAAGCAAAGCCTACAGCAACTGTT | |
| | ACCCTTATGATGTGCCGGATTATGCCTCCCTTAGGTCACTAGTTGCC | |
| | TCATCCGGCACACTGGAGTTTAACAATGAAAGCTTCAATTGGGCTGG | |
| | AGTCACTCAAAACGGAACAAGTTCTGCTTGCATAAGGGGATCTAATA | |
| | GTAGTTTCTTTAGTAGATTAAATTGGTTGACCCACTTAAACTTCAAGTA | |
| | CCCAGCATTGAACGTGACTATGCCAAACAATGAACAATTTGACAAATT | |
| | GTACATTTGGGGGGTTCACCACCCGGGTACGGACAAGGACCAAATC | |
| | TTCCTGTATGCTCAATCATCAGGAAGAATCACAGTATCTACCAAAAGA | |
| | AGCCAACAAGCTGTAATCCCGAATATCGGATCTAGACCCAGAATAAG | |
| | GAATATCCCTAGCAGAATAAGCATCTATTGGACAATAGTAAAACCGG | |
| | GAGACATACTTTTGATTAACAGCACAGGGAATCTAATTGCTCCTAGG | |
| | GGTTACTTCAAAATACGAAGTGGGAAAAGCTCAATAATGAGATCAGAT | |
| | GCACCCATTGGCAAATGCAAGTCTGAATGCATCACTCCAAATGGAAG | |
| | CATTCCCAATGACAAACCATTCCAAAATGTAAACAGGATCACATACGG | |
| | GGCCTGTCCCAGATATGTTAAGCAAAGCACTCTGAAATTGGCAACAG | |
| | GAATGCGAAATGTACCAGAGAAACAAACTAGAGGCATATTTGGCGCA | |
| | ATAGCGGGTTTCATAGAAAATGGTTGGGAGGGAATGGTGGATGGTTG | |
| | GTACGGTTTCAGGCATCAAAATTCTGAGGGAAGAGGACAAGCAGCA | |
| | GATCTCAAAAGCACTCAAGCAGCAATCGATCAAATCAATGGGAAGCT | |
| | GAATCGATTGATCGGGAAAACCAACGAGAAATTCCATCAGATTGAGA | |
| | AAGAATTCTCAGAAGTAGAAGGGAGAATTCAGGACCTTGAGAAATAT | |
| | GTTGAGGACACAAAAATAGATCTCTGGTCATACAACGCAGAGCTTCT | |
| | TGTTGCCCTGGAAAACCAACATACAATTGATCTAACTGACTCAGAAAT | |
| | GAACAAACTGTTTGAAAAAACAAAGAAGCAACTGAGGGAAAATGCTG | |
| | AGGATATGGGCAATGGTTGTTTCAAAATATACCACAAATGTGACAATG | |
| | CCTGCATAGGATCAATCAGAAATGGAACTTATGACCACGATGTATACA | |
| | GGGATGAAGCATTAAACAACCGGTTCCAGATCAAGGGAGTTGAGCTG | |
| | AAGTCAGGGTACAAAGATTGGATCCTATGGATTTCCTTTGCCATATCA | |
| | TGTTTTTTGCTTTGTGTTGCTTTGTTGGGGTTCATCATGTGGGCCTGC | |
| | CAAAAGGGCAACATTAGGTGCAACATTTGCATTTGAGTGCATTAATTA | |
| | AAAACACCCTTGTTTCTACTGGAAGCGGAGCCACGAACTTCTCTCTG | |
| | TTAAAGCAAGCAGGAGATGTTGAAGAAAACCCCGGGCCTATTTTCTA | |
| | ATATCCACAAAATGAAGGCAATAATTGTACTACTCATGGTAGTAACAT | |
| | CCAATGCAGATCGAATCTGCACTGGGATAACATCGTCAAACTCACCA | |
| | CATGTCGTCAAAACTGCTACTCAAGGGGAGGTCAACGTGACCGGTGT | |
| | AATACCACTGACAACAACACCCACCAAATCTCATTTTGCAAATCTCAA | |
| | AGGAACAGAAACCAGGGGGAAACTATGCCCAAAATGCCTCAACTGCA | |
| | CAGATCTGGATGTAGCCTTGGGCAGACCAAAATGCACAGGGAAAATA | |
| | CCCTCTGCAAGGGTTTCAATACTCCATGAAGTCAGACCTGTTACATCT | |
| | GGGTGCTTTCCTATAATGCACGATAGAACAAAAATTAGACAGCTGCC | |
| | TAACCTTCTCCGAGGATACGAACATGTCAGGTTATCAACTCACAACGT | |
| | TATCAATGCAAAAGATGCACCAGGAAGACCCTACGAAATTGGAACCT | |
| | CAGGGTCTTGCCCTAACATTACCAATGGAAACGGATTCTTCGCAACA | |
| | ATGGCTTGGGCCGTCCCAAAAAACAAAACAGCAACAAATCCATTAAC | |
| | AATAGAAGTACCATACATTTGTACAGAAGGAGAAGACCAAATTACCGT | |
| | TTGGGGGTTCCACTCTGACAACGAGACCCAAATGGCAAAGCTCTATG | |
| | GGGACTCAAAGCCCCAGAAGTTCACCTCATCTGCCAACGGAGTGAC | |
| | CACACATTACGTTTCACAGATTGGTGGCTTCCCAAATCAAACAGAAGA | |
| | CGGAGGACTACCACAAAGTGGCAGAATTGTTGTTGATTACATGGTGC | |
| | AGAAATCTGGAAAAACAGGAACAATTACCTATCAAAGAGGTATTTTAT | |
| | TGCCTCAAAAAGTGTGGTGCGCAAGTGGCAGGAGCAAGGTAATAAAA | |
| | GGATCCTTGCCCTTAATTGGAGAAGCAGATTGCCTCCATGAAAAATA | |
| | CGGTGGATTAAACAAAAGCAAGCCTTACTACACAGGGGAACATGCAA | |
| | AGGCCATAGGAAATTGCCCAATATGGGTGAAAACACCCTTGAAGCTG | |
| | GCCAATGGAACCAAATATAGACCCCCTGCAAAACTATTAAAGGAAAG | |
| | AGGTTTCTTCGGAGCCATTGCTGGTTTCTTAGAGGGAGGATGGGAAG | |
| | GAATGATTGCAGGTTGGCACGGATACACATCCCATGGGGCACATGG | |
| | AGTAGCGGTGGCAGCTGACCTTAAGAGCACTCAAGAGGCCATAAAC | |
| | AAGATAACAAAAAATCTCAACTCTTTGAGTGAGCTGGAAGTAAAGAAT | |
| | CTTCAAAGACTAAGCGGTGCCATGGATGAACTCCACAACGAAATACT | |
| | AGAACTAGATGAGAAAGTGGATGATCTCAGAGCTGACACAATAAGCT | |
| | CACAAATAGAACTCGCAGTCCTGCTTTCCAATGAAGGAATAATAAACA | |
| | GTGAAGATGAACATCTCTTGGCGCTTGAAAGAAAGCTGAAGAAAATG | |
| | CTGGGCCCCTCTGCTGTAGAGATAGGGAATGGATGCTTTGAAACCAA | |
| | ACACAAGTGCAACCAGACCTGCCTCGACAGAATAGCTGCTGGTACCT | |
| | TTGATGCAGGAGAATTTTCTCTCCCCACCTTTGATTCACTGAATATTA | |
| | CTGCTGCATCTTTAAATGACGACGGATTGGACAATCATACTATACTGC | |
| | TTTACTACTCAACTGCTGCCTCCAGTTTGGCTGTAACACTGATGATAG | |
| | CTATCTTTGTTGTTTATATGGTCTCCAGAGACAATGTTTCTTGCTCCAT | |
| | TTGTCTATAAGGAAAGTTAAGCCCTGTATTTTCCTTTATTGTAGTGCTT | |
| | GTTTGCTTGTTGTCATTACAAAGAAACGTTATTGAAAAATGGAAGCGG | |
| | AGCCACGAACTTCTCTCTGTTAAAGCAAGCAGGAGATGTTGAAGAAA | |
| | ACCCCGGGCCTTTCGGAGCTATTGCTGGTTTCTTGGAAGGAGGATG | |
| | GGAAGGAATGATTGCAGGTTGGCACGGATACACATCTCATGGAGCA | |
| | CATGGAGTAGCAGTGGCAGCAGACCTTAAGAGTACCCATGATGACTC | |
| | GAGCTGGTACTGCATGCACGCAATGCTAGCTGCCCCTTTCCCGTCCT | |
| | GGGTACCCCGAGTCTCCCCCGACCTCGGGTCCCAGGTATGCTCCCA | |
| | CCTCCACCTGCCCCACTCACCACCTCTGCTAGTTCCAGACACCTCCC | |
| | AAGCACGCAGCAATGCAGCTCAAAACGCTTAGCCTAGCCACACCCC | |
| | CACGGGAAACAGCAGTGATTAACCTTTAGCAATAAACGAAAGTTTAAC | |
| | TAAGCTATACTAACCCCAGGGTTGGTCAATTTCGTGCCAGCCACACC | |
| | CTGGAGCTAGCAAAAAAAA | |
| Pan-CoV-Flu | CTCGACATTGATTATTGACTAGTTATTAATAGTAATCAATTACGGGGT | 397 |
| Vaccine #9 | CATTAGTTCATAGCCCATATATGGAGTTCCGCGTTACATAACTTACGG | |
| CoV- Omicron | TAAATGGCCCGCCTGGCTGACCGCCCAACGACCCCCGCCCATTGAC | |
| BA.2 | GTCAATAATGACGTATGTTCCCATAGTAACGCCAATAGGGACTTTCCA | |
| Spike(HexaPro)- | TTGACGTCAATGGGTGGAGTATTTACGGTAAACTGCCCACTTGGCAG | |
| Influenza (HA) | TACATCAAGTGTATCATATGCCAAGTACGCCCCCTATTGACGTCAATG | |
| | ACGGTAAATGGCCCGCCTGGCATTATGCCCAGTACATGACCTTATGG | |
| | GACTTTCCTACTTGGCAGTACATCTACGTATTAGTCATCGCTATTACC | |
| | ATGGTCGAGGTGAGCCCCACGTTCTGCTTCACTCTCCCCATCTCCCC | |
| | CCCCTCCCCACCCCCAATTTTGTATTTATTTATTTTTTAATTATTTTGT | |
| | GCAGCGATGGGGGCGGGGGGGGGGGGGGGGCGCGCGCCAGGCG | |
| | GGGCGGGGCGGGGCGAGGGGCGGGGCGGGGCGAGGCGGAGAGG | |
| | TGCGGCGGCAGCCAATCAGAGCGGCGCGCTCCGAAAGTTTCCTTTT | |
| | ATGGCGAGGCGGCGGCGGCGGCGGCCCTATAAAAAGCGAAGCGCG | |
| | CGGCGGGCGGGAGTCGCTGCGCGCTGCCTTCGCCCCGTGCCCCGC | |
| | TCCGCCGCCGCCTCGCGCCGCCCGCCCCGGCTCTGACTGACCGCG | |
| | TTACTCCCACAGGTGAGCGGGCGGGACGGCCCTTCTCCTCCGGGCT | |
| | GTAATTAGCGCTTGGTTTAATGACGGCTTGTTTCTTTTCTGTGGCTGC | |
| | GTGAAAGCCTTGAGGGGCTCCGGGAGGGCCCTTTGTGCGGGGGGA | |
| | GCGGCTCGGGGGGTGCGTGCGTGTGTGTGTGCGTGGGGAGCGCCG | |
| | CGTGCGGCTCCGCGCTGCCCGGCGGCTGTGAGCGCTGCGGGCGCG | |
| | GCGCGGGGCTTTGTGCGCTCCGCAGTGTGCGCGAGGGGAGCGCGG | |
| | CCGGGGGCGGTGCCCCGCGGTGCGGGGGGGGCTGCGAGGGGAAC | |
| | AAAGGCTGCGTGCGGGGTGTGTGCGTGGGGGGGTGAGCAGGGGGT | |
| | GTGGGCGCGTCGGTCGGGCTGCAACCCCCCCTGCACCCCCCTCCC | |
| | CGAGTTGCTGAGCACGGCCCGGCTTCGGGTGCGGGGCTCCGTACG | |
| | GGGCGTGGCGCGGGGCTCGCCGTGCCGGGCGGGGGGTGGCGGCA | |
| | GGTGGGGGTGCCGGGCGGGGCGGGGCCGCCTCGGGCCGGGGAG | |
| | GGCTCGGGGGAGGGGCGCGGCGGCCCCCGGAGCGCCGGCGGCTG | |
| | TCGAGGCGCGGCGAGCCGCAGCCATTGCCTTTTATGGTAATCGTGC | |
| | GAGAGGGCGCAGGGACTTCCTTTGTCCCAAATCTGTGCGGAGCCGA | |
| | AATCTGGGAGGCGCCGCCGCACCCCCTCTAGCGGGCGCGGGGCGA | |
| | AGCGGTGCGGCGCCGGCAGGAAGGAAATGGGCGGGGAGGGCCTTC | |
| | GTGCGTCGCCGCGCCGCCGTCCCCTTCTCCCTCTCCAGCCTCGGGG | |
| | CTGTCCGCGGGGGGACGGCTGCCTTCGGGGGGGACGGGGCAGGG | |
| | CGGGGTTCGGCTTCTGGCGTGTGACCGGCGGCTCTAGAGCCTCTGC | |
| | TAACCATGTTCATGCCTTCTTCTTTTTCCTACAGCTCCTGGGCAACGT | |
| | GCTGGTTATTGTGCTGTCTCATCATTTTGGCAAAGAATTGGAGAATAA | |
| | ACTAGTATTCTTCTGGTCCCCACAGACTCAGAGAGAACCCGCCACCA | |
| | TGTTCGTGTTCCTGGTGCTGCTGCCCCTGGTGAGCAGCCAGTGCGT | |
| | GAACCTGATCACCAGGACCCAGAGCTACACCAACAGCTTCACCAGG | |
| | GGCGTGTACTACCCCGACAAGGTGTTCAGGAGCAGCGTGCTGCACA | |
| | GCACCCAGGACCTGTTCCTGCCCTTCTTCAGCAACGTGACCTGGTTC | |
| | CACGCCATCCACGTGAGCGGCACCAACGGCACCAAGAGGTTCGACA | |
| | ACCCCGTGCTGCCCTTCAACGACGGCGTGTACTTCGCCAGCACCGA | |
| | GAAGAGCAACATCATCAGGGGCTGGATCTTCGGCACCACCCTGGAC | |
| | AGCAAGACCCAGAGCCTGCTGATCGTGAACAACGCCACCAACGTGG | |
| | TGATCAAGGTGTGCGAGTTCCAGTTCTGCAACGACCCCTTCCTGGAC | |
| | GTGTACTACCACAAGAACAACAAGAGCTGGATGGAGAGCGAGTTCA | |
| | GGGTGTACAGCAGCGCCAACAACTGCACCTTCGAGTACGTGAGCCA | |
| | GCCCTTCCTGATGGACCTGGAGGGCAAGCAGGGCAACTTCAAGAAC | |
| | CTGAGGGAGTTCGTGTTCAAGAACATCGACGGCTACTTCAAGATCTA | |
| | CAGCAAGCACACCCCCATCAACCTGGGCAGGGACCTGCCCCAGGGC | |
| | TTCAGCGCCCTGGAGCCCCTGGTGGACCTGCCCATCGGCATCAACA | |
| | TCACCAGGTTCCAGACCCTGCTGGCCCTGCACAGGAGCTACCTGAC | |
| | CCCCGGCGACAGCAGCAGCGGCTGGACCGCCGGCGCCGCCGCCTA | |
| | CTACGTGGGCTACCTGCAGCCCAGGACCTTCCTGCTGAAGTACAAC | |
| | GAGAACGGCACCATCACCGACGCCGTGGACTGCGCCCTGGACCCC | |
| | CTGAGCGAGACCAAGTGCACCCTGAAGAGCTTCACCGTGGAGAAGG | |
| | GCATCTACCAGACCAGCAACTTCAGGGTGCAGCCCACCGAGAGCAT | |
| | CGTGAGGTTCCCCAACATCACCAACCTGTGCCCCTTCGACGAGGTGT | |
| | TCAACGCCACCAGGTTCGCCAGCGTGTACGCCTGGAACAGGAAGAG | |
| | GATCAGCAACTGCGTGGCCGACTACAGCGTGCTGTACAACTTCGCC | |
| | CCCTTCTTCGCCTTCAAGTGCTACGGCGTGAGCCCCACCAAGCTGAA | |
| | CGACCTGTGCTTCACCAACGTGTACGCCGACAGCTTCGTGATCAGG | |
| | GGCAACGAGGTGAGCCAGATCGCCCCCGGCCAGACCGGCAACATC | |
| | GCCGACTACAACTACAAGCTGCCCGACGACTTCACCGGCTGCGTGA | |
| | TCGCCTGGAACAGCAACAAGCTGGACAGCAAGGTGGGCGGCAACTA | |
| | CAACTACCTGTACAGGCTGTTCAGGAAGAGCAACCTGAAGCCCTTCG | |
| | AGAGGGACATCAGCACCGAGATCTACCAGGCCGGCAACAAGCCCTG | |
| | CAACGGCGTGGCCGGCTTCAACTGCTACTTCCCCCTGAGGAGCTAC | |
| | GGCTTCAGGCCCACCTACGGCGTGGGCCACCAGCCCTACAGGGTG | |
| | GTGGTGCTGAGCTTCGAGCTGCTGCACGCCCCCGCCACCGTGTGCG | |
| | GCCCCAAGAAGAGCACCAACCTGGTGAAGAACAAGTGCGTGAACTT | |
| | CAACTTCAACGGCCTGACCGGCACCGGCGTGCTGACCGAGAGCAAC | |
| | AAGAAGTTCCTGCCCTTCCAGCAGTTCGGCAGGGACATCGCCGACA | |
| | CCACCGACGCCGTGAGGGACCCCCAGACCCTGGAGATCCTGGACAT | |
| | CACCCCCTGCAGCTTCGGCGGCGTGAGCGTGATCACCCCCGGCACC | |
| | AACACCAGCAACCAGGTGGCCGTGCTGTACCAGGGCGTGAACTGCA | |
| | CCGAGGTGCCCGTGGCCATCCACGCCGACCAGCTGACCCCCACCTG | |
| | GAGGGTGTACAGCACCGGCAGCAACGTGTTCCAGACCAGGGCCGG | |
| | CTGCCTGATCGGCGCCGAGTACGTGAACAACAGCTACGAGTGCGAC | |
| | ATCCCCATCGGCGCCGGCATCTGCGCCAGCTACCAGACCCAGACCA | |
| | AGAGCCACCAGCAGGCCCAGAGCGTGGCCAGCCAGAGCATCATCG | |
| | CCTACACCATGAGCCTGGGCGCCGAGAACAGCGTGGCCTACAGCAA | |
| | CAACAGCATCGCCATCCCCACCAACTTCACCATCAGCGTGACCACCG | |
| | AGATCCTGCCCGTGAGCATGACCAAGACCAGCGTGGACTGCACCAT | |
| | GTACATCTGCGGCGACAGCACCGAGTGCAGCAACCTGCTGCTGCAG | |
| | TACGGCAGCTTCTGCACCCAGCTGAAGAGGGCCCTGACCGGCATCG | |
| | CCGTGGAGCAGGACAAGAACACCCAGGAGGTGTTCGCCCAGGTGAA | |
| | GCAGATCTACAAGACCCCCCCCATCAAGTACTTCGGCGGCTTCAACT | |
| | TCAGCCAGATCCTGCCCGACCCCAGCAAGCCCAGCAAGAGGAGCCC | |
| | CATCGAGGACCTGCTGTTCAACAAGGTGACCCTGGCCGACGCCGGC | |
| | TTCATCAAGCAGTACGGCGACTGCCTGGGCGACATCGCCGCCAGGG | |
| | ACCTGATCTGCGCCCAGAAGTTCAACGGCCTGACCGTGCTGCCCCC | |
| | CCTGCTGACCGACGAGATGATCGCCCAGTACACCAGCGCCCTGCTG | |
| | GCCGGCACCATCACCAGCGGCTGGACCTTCGGCGCCGGCCCCGCC | |
| | CTGCAGATCCCCTTCCCCATGCAGATGGCCTACAGGTTCAACGGCAT | |
| | CGGCGTGACCCAGAACGTGCTGTACGAGAACCAGAAGCTGATCGCC | |
| | AACCAGTTCAACAGCGCCATCGGCAAGATCCAGGACAGCCTGAGCA | |
| | GCACCCCCAGCGCCCTGGGCAAGCTGCAGGACGTGGTGAACCACAA | |
| | CGCCCAGGCCCTGAACACCCTGGTGAAGCAGCTGAGCAGCAAGTTC | |
| | GGCGCCATCAGCAGCGTGCTGAACGACATCCTGAGCAGGCTGGACC | |
| | CCCCCGAGGCCGAGGTGCAGATCGACAGGCTGATCACCGGCAGGC | |
| | TGCAGAGCCTGCAGACCTACGTGACCCAGCAGCTGATCAGGGCCGC | |
| | CGAGATCAGGGCCAGCGCCAACCTGGCCGCCACCAAGATGAGCGA | |
| | GTGCGTGCTGGGCCAGAGCAAGAGGGTGGACTTCTGCGGCAAGGG | |
| | CTACCACCTGATGAGCTTCCCCCAGAGCGCCCCCCACGGCGTGGTG | |
| | TTCCTGCACGTGACCTACGTGCCCGCCCAGGAGAAGAACTTCACCA | |
| | CCGCCCCCGCCATCTGCCACGACGGCAAGGCCCACTTCCCCAGGGA | |
| | GGGCGTGTTCGTGAGCAACGGCACCCACTGGTTCGTGACCCAGAGG | |
| | AACTTCTACGAGCCCCAGATCATCACCACCGACAACACCTTCGTGAG | |
| | CGGCAACTGCGACGTGGTGATCGGCATCGTGAACAACACCGTGTAC | |
| | GACCCCCTGCAGCCCGAGCTGGACAGCTTCAAGGAGGAGCTGGACA | |
| | AGTACTTCAAGAACCACACCAGCCCCGACGTGGACCTGGGCGACAT | |
| | CAGCGGCATCAACGCCAGCGTGGTGAACATCCAGAAGGAGATCGAC | |
| | AGGCTGAACGAGGTGGCCAAGAACCTGAACGAGAGCCTGATCGACC | |
| | TGCAGGAGCTGGGCAAGTACGAGCAGTACATCAAGTGGCCCTGGTA | |
| | CATCTGGCTGGGCTTCATCGCCGGCCTGATCGCCATCGTGATGGTG | |
| | ACCATCATGCTGTGCTGCATGACCAGCTGCTGCAGCTGCCTGAAGG | |
| | GCTGCTGCAGCTGCGGCAGCTGCTGCAAGTTCGACGAGGACGACAG | |
| | CGAGCCCGTGCTGAAGGGCGTGAAGCTGCACTACACCGGAAGCGG | |
| | AGCCACGAACTTCTCTCTGTTAAAGCAAGCAGGAGATGTTGAAGAAA | |
| | ACCCCGGGCCTATGAAGGCAATACTAGTAGTTCTGCTATATACATTTG | |
| | CAACCGCAAATGCAGACACATTATGTATAGGTTATCATGCGAACAACT | |
| | CAACAGACACTGTAGACACAGTACTAGAAAAGAATGTAACAGTAACA | |
| | CACTCTGTTAACCTTCTAGAAGACAAGCATAACGGGAAACTATGCAAA | |
| | CTAAGAGGGGTAGCCCCATTGCATTTGGGTAAATGTAACATTGCTGG | |
| | CTGGATCCTGGGAAATCCAGAGTGTGAATCACTCTCCACAGCAAGCT | |
| | CATGGTCCTACATTGTGGAAACATCTAGTTCAGACAATGGAACGTGTT | |
| | ACCCAGGAGATTTCATCGATTATGAGGAGCTAAGAGAGCAATTGAGC | |
| | TCAGTGTCATCATTTGAAAGGTTTGAGATATTCCCCAAGACAAGTTCA | |
| | TGGCCCAATCATGACTCGAACAAAGGTGTAACGACAGCATGTCCTCA | |
| | TGCTGGAGCAAAAAGCTTCTACAAAAATTTAATATGGCTAGTTAAAAA | |
| | AGGAAATTCATACCCAAAGCTCAGCAAATCCTACATTAATGATAAAGG | |
| | GAAAGAAGTCCTCGTGCTATGGGGCATTCACCATCCACCTACTAGTG | |
| | CTGACCAACAAAGTCTCTATCAGAATGCAGATGCATATGTTTTTGTGG | |
| | GGACATCAAGATACAGCAAGAAGTTCAAGCCGGAAATAGCAATAAGG | |
| | CCCAAAGTGAGGGATCAAGAAGGGAGAATGAACTATTACTGGACACT | |
| | AGTAGAGCCGGGAGACAAAATAACATTCGAAGCAACTGGAAATCTAG | |
| | TGGTACCGAGATATGCATTCGCAATGGAAAGAAATGCTGGATCTGGT | |
| | ATTATCATTTCAGATACACCAGTCCACGATTGCAATACAACTTGTCAG | |
| | ACACCCAAGGGTGCTATAAACACCAGCCTCCCATTTCAGAACATACA | |
| | TCCGATCACAATTGGAAAATGTCCAAAATATGTAAAAAGCACAAAATT | |
| | GAGACTGGCCACAGGATTGAGGAATGTCCCGTCCATTCAATCTAGAG | |
| | GCCTATTTGGGGCCATTGCCGGTTTCATTGAAGGGGGGTGGACAGG | |
| | GATGGTAGATGGATGGTACGGTTATCACCATCAAAATGAGCAGGGGT | |
| | CAGGATATGCAGCCGACCTGAAGAGCACACAGAATGCCATTGACGA | |
| | GATTACTAACAAAGTAAACTCTGTTATTGAAAAAATGAATACACAGTTC | |
| | ACAGCAGTAGGTAAAGAGTTCAACCACCTGGAAAAAAGAATAGAGAA | |
| | TTTAAATAAAAAAGTTGATGATGGTTTCCTGGACATTTGGACTTACAAT | |
| | GCCGAACTGTTGGTTCTATTGGAAAATGAAAGAACTTTGGACTACCA | |
| | CGATTCAAAGGTGAAGAACTTATATGAAAAGGTAAGAAGCCAGTTAAA | |
| | AAACAATGCCAAGGAAATTGGAAACGGCTGCTTTGAATTTTACCACAA | |
| | ATGTGATAACACGTGCATGGAAAGTGTCAAAAATGGGACTTATGACT | |
| | ACCCAAAATACTCAGAGGAAGCAAAATTAAACAGAGAAGAAATAGAT | |
| | GGGGTAAAGCTGGAATCAACAAGGATTTACCAGATTTTGGCGATCTA | |
| | TTCAACCGTCGCCAGTTCATTGGTACTGGTAGTCTCCCTGGGGGCAA | |
| | TCAGTTTCTGGATGTGCTCTAATGGGTCTCTACAGTGTAGAATATGTA | |
| | TTTAAGGAAGCGGAGCCACGAACTTCTCTCTGTTAAAGCAAGCAGGA | |
| | GATGTTGAAGAAAACCCCGGGCCTAGCAAAAGCAGGGGATAATTCTA | |
| | TTAACCATGAAGACTATCATTGCTTTGAGCTACATTCTATGTCTGGTTT | |
| | TCGCTCAAAAACTTCCTGGAAATGACAATAGCACTGCAACGCTGTGC | |
| | CTTGGGCACCATGCAGTACCAAACGGAACGATAGTGAAAACAATCAC | |
| | GAATGACCAAATTGAAGTTACTAATGCTACTGAGCTGGTTCAGAATTC | |
| | CTCAATAGGTGAAATATGCGACAGTCCTCATCAGATCCTTGATGGAG | |
| | AAAACTGCACACTAATAGATGCTCTATTGGGAGACCCTCAGTGTGAT | |
| | GGCTTTCAAAATAAGAAATGGGACCTTTTTGTTGAACGAAGCAAAGC | |
| | CTACAGCAACTGTTACCCTTATGATGTGCCGGATTATGCCTCCCTTAG | |
| | GTCACTAGTTGCCTCATCCGGCACACTGGAGTTTAACAATGAAAGCT | |
| | TCAATTGGGCTGGAGTCACTCAAAACGGAACAAGTTCTGCTTGCATA | |
| | AGGGGATCTAATAGTAGTTTCTTTAGTAGATTAAATTGGTTGACCCAC | |
| | TTAAACTTCAAGTACCCAGCATTGAACGTGACTATGCCAAACAATGAA | |
| | CAATTTGACAAATTGTACATTTGGGGGGTTCACCACCCGGGTACGGA | |
| | CAAGGACCAAATCTTCCTGTATGCTCAATCATCAGGAAGAATCACAGT | |
| | ATCTACCAAAAGAAGCCAACAAGCTGTAATCCCGAATATCGGATCTA | |
| | GACCCAGAATAAGGAATATCCCTAGCAGAATAAGCATCTATTGGACA | |
| | ATAGTAAAACCGGGAGACATACTTTTGATTAACAGCACAGGGAATCTA | |
| | ATTGCTCCTAGGGGTTACTTCAAAATACGAAGTGGGAAAAGCTCAAT | |
| | AATGAGATCAGATGCACCCATTGGCAAATGCAAGTCTGAATGCATCA | |
| | CTCCAAATGGAAGCATTCCCAATGACAAACCATTCCAAAATGTAAACA | |
| | GGATCACATACGGGGCCTGTCCCAGATATGTTAAGCAAAGCACTCTG | |
| | AAATTGGCAACAGGAATGCGAAATGTACCAGAGAAACAAACTAGAGG | |
| | CATATTTGGCGCAATAGCGGGTTTCATAGAAAATGGTTGGGAGGGAA | |
| | TGGTGGATGGTTGGTACGGTTTCAGGCATCAAAATTCTGAGGGAAGA | |
| | GGACAAGCAGCAGATCTCAAAAGCACTCAAGCAGCAATCGATCAAAT | |
| | CAATGGGAAGCTGAATCGATTGATCGGGAAAACCAACGAGAAATTCC | |
| | ATCAGATTGAGAAAGAATTCTCAGAAGTAGAAGGGAGAATTCAGGAC | |
| | CTTGAGAAATATGTTGAGGACACAAAAATAGATCTCTGGTCATACAAC | |
| | GCAGAGCTTCTTGTTGCCCTGGAAAACCAACATACAATTGATCTAACT | |
| | GACTGAGAAATGAACAAACTGTTTGAAAAAACAAAGAAGCAACTGAG | |
| | GGAAAATGCTGAGGATATGGGCAATGGTTGTTTCAAAATATACCACA | |
| | AATGTGACAATGCCTGCATAGGATCAATCAGAAATGGAACTTATGAC | |
| | CACGATGTATACAGGGATGAAGCATTAAACAACCGGTTCCAGATCAA | |
| | GGGAGTTGAGCTGAAGTCAGGGTACAAAGATTGGATCCTATGGATTT | |
| | CCTTTGCCATATCATGTTTTTTGCTTTGTGTTGCTTTGTTGGGGTTCAT | |
| | CATGTGGGCCTGCCAAAAGGGCAACATTAGGTGCAACATTTGCATTT | |
| | GAGTGCATTAATTAAAAACACCCTTGTTTCTACTGGAAGCGGAGCCA | |
| | CGAACTTCTCTCTGTTAAAGCAAGCAGGAGATGTTGAAGAAAACCCC | |
| | GGGCCTATTTTCTAATATCCACAAAATGAAGGCAATAATTGTACTACT | |
| | CATGGTAGTAACATCCAATGCAGATCGAATCTGCACTGGGATAACAT | |
| | CGTCAAACTCACCACATGTCGTCAAAACTGCTACTCAAGGGGAGGTC | |
| | AACGTGACCGGTGTAATACCACTGACAACAACACCCACCAAATCTCA | |
| | TTTTGCAAATCTCAAAGGAACAGAAACCAGGGGGAAACTATGCCCAA | |
| | AATGCCTCAACTGCACAGATCTGGATGTAGCCTTGGGCAGACCAAAA | |
| | TGCACAGGGAAAATACCCTCTGCAAGGGTTTCAATACTCCATGAAGT | |
| | CAGACCTGTTACATCTGGGTGCTTTCCTATAATGCACGATAGAACAAA | |
| | AATTAGACAGCTGCCTAACCTTCTCCGAGGATACGAACATGTCAGGT | |
| | TATCAACTCACAACGTTATCAATGCAAAAGATGCACCAGGAAGACCC | |
| | TACGAAATTGGAACCTCAGGGTCTTGCCCTAACATTACCAATGGAAA | |
| | CGGATTCTTCGCAACAATGGCTTGGGCCGTCCCAAAAAACAAAACAG | |
| | CAACAAATCCATTAACAATAGAAGTACCATACATTTGTACAGAAGGAG | |
| | AAGACCAAATTACCGTTTGGGGGTTCCACTCTGACAACGAGACCCAA | |
| | ATGGCAAAGCTCTATGGGGACTCAAAGCCCCAGAAGTTCACCTCATC | |
| | TGCCAACGGAGTGACCACACATTACGTTTCACAGATTGGTGGCTTCC | |
| | CAAATCAAACAGAAGACGGAGGACTACCACAAAGTGGCAGAATTGTT | |
| | GTTGATTACATGGTGCAGAAATCTGGAAAAACAGGAACAATTACCTAT | |
| | CAAAGAGGTATTTTATTGCCTCAAAAAGTGTGGTGCGCAAGTGGCAG | |
| | GAGCAAGGTAATAAAAGGATCCTTGCCCTTAATTGGAGAAGCAGATT | |
| | GCCTCCATGAAAAATACGGTGGATTAAACAAAAGCAAGCCTTACTAC | |
| | ACAGGGGAACATGCAAAGGCCATAGGAAATTGCCCAATATGGGTGAA | |
| | AACACCCTTGAAGCTGGCCAATGGAACCAAATATAGACCCCCTGCAA | |
| | AACTATTAAAGGAAAGAGGTTTCTTCGGAGCCATTGCTGGTTTCTTAG | |
| | AGGGAGGATGGGAAGGAATGATTGCAGGTTGGCACGGATACACATC | |
| | CCATGGGGCACATGGAGTAGCGGTGGCAGCTGACCTTAAGAGCACT | |
| | CAAGAGGCCATAAACAAGATAACAAAAAATCTCAACTCTTTGAGTGAG | |
| | CTGGAAGTAAAGAATCTTCAAAGACTAAGCGGTGCCATGGATGAACT | |
| | CCACAACGAAATACTAGAACTAGATGAGAAAGTGGATGATCTCAGAG | |
| | CTGACACAATAAGCTCACAAATAGAACTCGCAGTCCTGCTTTCCAATG | |
| | AAGGAATAATAAACAGTGAAGATGAACATCTCTTGGCGCTTGAAAGA | |
| | AAGCTGAAGAAAATGCTGGGCCCCTCTGCTGTAGAGATAGGGAATG | |
| | GATGCTTTGAAACCAAACACAAGTGCAACCAGACCTGCCTCGACAGA | |
| | ATAGCTGCTGGTACCTTTGATGCAGGAGAATTTTCTCTCCCCACCTTT | |
| | GATTCACTGAATATTACTGCTGCATCTTTAAATGACGACGGATTGGAC | |
| | AATCATACTATACTGCTTTACTACTCAACTGCTGCCTCCAGTTTGGCT | |
| | GTAACACTGATGATAGCTATCTTTGTTGTTTATATGGTCTCCAGAGAC | |
| | AATGTTTCTTGCTCCATTTGTCTATAAGGAAAGTTAAGCCCTGTATTTT | |
| | CCTTTATTGTAGTGCTTGTTTGCTTGTTGTCATTACAAAGAAACGTTAT | |
| | TGAAAAATGGAAGCGGAGCCACGAACTTCTCTCTGTTAAAGCAAGCA | |
| | GGAGATGTTGAAGAAAACCCCGGGCCTTTCGGAGCTATTGCTGGTTT | |
| | CTTGGAAGGAGGATGGGAAGGAATGATTGCAGGTTGGCACGGATAC | |
| | ACATCTCATGGAGCACATGGAGTAGCAGTGGCAGCAGACCTTAAGA | |
| | GTACCCATGATGACTCGAGCTGGTACTGCATGCACGCAATGCTAGCT | |
| | GCCCCTTTCCCGTCCTGGGTACCCCGAGTCTCCCCCGACCTCGGGT | |
| | CCCAGGTATGCTCCCACCTCCACCTGCCCCACTCACCACCTCTGCTA | |
| | GTTCCAGACACCTCCCAAGCACGCAGCAATGCAGCTCAAAACGCTTA | |
| | GCCTAGCCACACCCCCACGGGAAACAGCAGTGATTAACCTTTAGCAA | |
| | TAAACGAAAGTTTAACTAAGCTATACTAACCCCAGGGTTGGTCAATTT | |
| | CGTGCCAGCCACACCCTGGAGCTAGCAAAAAAAA | |
| Pan-CoV-Flu | CTCGACATTGATTATTGACTAGTTATTAATAGTAATCAATTACGGGGT | 398 |
| Vaccine #10 | CATTAGTTCATAGCCCATATATGGAGTTCCGCGTTACATAACTTACGG | |
| CoV-Omicron | TAAATGGCCCGCCTGGCTGACCGCCCAACGACCCCCGCCCATTGAC | |
| BA.2 Spike(2 | GTCAATAATGACGTATGTTCCCATAGTAACGCCAATAGGGACTTTCCA | |
| proline | TTGACGTCAATGGGTGGAGTATTTACGGTAAACTGCCCACTTGGCAG | |
| substitution)- | TACATCAAGTGTATCATATGCCAAGTACGCCCCCTATTGACGTCAATG | |
| Influenza (HA) | ACGGTAAATGGCCCGCCTGGCATTATGCCCAGTACATGACCTTATGG | |
| | GACTTTCCTACTTGGCAGTACATCTACGTATTAGTCATCGCTATTACC | |
| | ATGGTCGAGGTGAGCCCCACGTTCTGCTTCACTCTCCCCATCTCCCC | |
| | CCCCTCCCCACCCCCAATTTTGTATTTATTTATTTTTTAATTATTTTGT | |
| | GCAGCGATGGGGGCGGGGGGGGGGGGGGGGCGCGCGCCAGGCG | |
| | GGGCGGGGCGGGGCGAGGGGCGGGGCGGGGCGAGGCGGAGAGG | |
| | TGCGGCGGCAGCCAATCAGAGCGGCGCGCTCCGAAAGTTTCCTTTT | |
| | ATGGCGAGGCGGCGGCGGCGGCGGCCCTATAAAAAGCGAAGCGCG | |
| | CGGCGGGCGGGAGTCGCTGCGCGCTGCCTTCGCCCCGTGCCCCGC | |
| | TCCGCCGCCGCCTCGCGCCGCCCGCCCCGGCTCTGACTGACCGCG | |
| | TTACTCCCACAGGTGAGCGGGCGGGACGGCCCTTCTCCTCCGGGCT | |
| | GTAATTAGCGCTTGGTTTAATGACGGCTTGTTTCTTTTCTGTGGCTGC | |
| | GTGAAAGCCTTGAGGGGCTCCGGGAGGGCCCTTTGTGCGGGGGGA | |
| | GCGGCTCGGGGGGTGCGTGCGTGTGTGTGTGCGTGGGGAGCGCCG | |
| | CGTGCGGCTCCGCGCTGCCCGGCGGCTGTGAGCGCTGCGGGCGCG | |
| | GCGCGGGGCTTTGTGCGCTCCGCAGTGTGCGCGAGGGGAGCGCGG | |
| | CCGGGGGCGGTGCCCCGCGGTGCGGGGGGGGCTGCGAGGGGAAC | |
| | AAAGGCTGCGTGCGGGGTGTGTGCGTGGGGGGGTGAGCAGGGGGT | |
| | GTGGGCGCGTCGGTCGGGCTGCAACCCCCCCTGCACCCCCCTCCC | |
| | CGAGTTGCTGAGCACGGCCCGGCTTCGGGTGCGGGGCTCCGTACG | |
| | GGGCGTGGCGCGGGGCTCGCCGTGCCGGGCGGGGGGTGGCGGCA | |
| | GGTGGGGGTGCCGGGCGGGGCGGGGCCGCCTCGGGCCGGGGAG | |
| | GGCTCGGGGGAGGGGCGCGGCGGCCCCCGGAGCGCCGGCGGCTG | |
| | TCGAGGCGCGGCGAGCCGCAGCCATTGCCTTTTATGGTAATCGTGC | |
| | GAGAGGGCGCAGGGACTTCCTTTGTCCCAAATCTGTGCGGAGCCGA | |
| | AATCTGGGAGGCGCCGCCGCACCCCCTCTAGCGGGCGCGGGGCGA | |
| | AGCGGTGCGGCGCCGGCAGGAAGGAAATGGGCGGGGAGGGCCTTC | |
| | GTGCGTCGCCGCGCCGCCGTCCCCTTCTCCCTCTCCAGCCTCGGGG | |
| | CTGTCCGCGGGGGGACGGCTGCCTTCGGGGGGGACGGGGCAGGG | |
| | CGGGGTTCGGCTTCTGGCGTGTGACCGGCGGCTCTAGAGCCTCTGC | |
| | TAACCATGTTCATGCCTTCTTCTTTTTCCTACAGCTCCTGGGCAACGT | |
| | GCTGGTTATTGTGCTGTCTCATCATTTTGGCAAAGAATTGGAGAATAA | |
| | ACTAGTATTCTTCTGGTCCCCACAGACTCAGAGAGAACCCGCCACCA | |
| | TGTTCGTGTTCCTGGTGCTGCTGCCCCTGGTGAGCAGCCAGTGCGT | |
| | GAACCTGATCACCAGGACCCAGAGCTACACCAACAGCTTCACCAGG | |
| | GGCGTGTACTACCCCGACAAGGTGTTCAGGAGCAGCGTGCTGCACA | |
| | GCACCCAGGACCTGTTCCTGCCCTTCTTCAGCAACGTGACCTGGTTC | |
| | CACGCCATCCACGTGAGCGGCACCAACGGCACCAAGAGGTTCGACA | |
| | ACCCCGTGCTGCCCTTCAACGACGGCGTGTACTTCGCCAGCACCGA | |
| | GAAGAGCAACATCATCAGGGGCTGGATCTTCGGCACCACCCTGGAC | |
| | AGCAAGACCCAGAGCCTGCTGATCGTGAACAACGCCACCAACGTGG | |
| | TGATCAAGGTGTGCGAGTTCCAGTTCTGCAACGACCCCTTCCTGGAC | |
| | GTGTACTACCACAAGAACAACAAGAGCTGGATGGAGAGCGAGTTCA | |
| | GGGTGTACAGCAGCGCCAACAACTGCACCTTCGAGTACGTGAGCCA | |
| | GCCCTTCCTGATGGACCTGGAGGGCAAGCAGGGCAACTTCAAGAAC | |
| | CTGAGGGAGTTCGTGTTCAAGAACATCGACGGCTACTTCAAGATCTA | |
| | CAGCAAGCACACCCCCATCAACCTGGGCAGGGACCTGCCCCAGGGC | |
| | TTCAGCGCCCTGGAGCCCCTGGTGGACCTGCCCATCGGCATCAACA | |
| | TCACCAGGTTCCAGACCCTGCTGGCCCTGCACAGGAGCTACCTGAC | |
| | CCCCGGCGACAGCAGCAGCGGCTGGACCGCCGGCGCCGCCGCCTA | |
| | CTACGTGGGCTACCTGCAGCCCAGGACCTTCCTGCTGAAGTACAAC | |
| | GAGAACGGCACCATCACCGACGCCGTGGACTGCGCCCTGGACCCC | |
| | CTGAGCGAGACCAAGTGCACCCTGAAGAGCTTCACCGTGGAGAAGG | |
| | GCATCTACCAGACCAGCAACTTCAGGGTGCAGCCCACCGAGAGCAT | |
| | CGTGAGGTTCCCCAACATCACCAACCTGTGCCCCTTCGACGAGGTGT | |
| | TCAACGCCACCAGGTTCGCCAGCGTGTACGCCTGGAACAGGAAGAG | |
| | GATCAGCAACTGCGTGGCCGACTACAGCGTGCTGTACAACTTCGCC | |
| | CCCTTCTTCGCCTTCAAGTGCTACGGCGTGAGCCCCACCAAGCTGAA | |
| | CGACCTGTGCTTCACCAACGTGTACGCCGACAGCTTCGTGATCAGG | |
| | GGCAACGAGGTGAGCCAGATCGCCCCCGGCCAGACCGGCAACATC | |
| | GCCGACTACAACTACAAGCTGCCCGACGACTTCACCGGCTGCGTGA | |
| | TCGCCTGGAACAGCAACAAGCTGGACAGCAAGGTGGGCGGCAACTA | |
| | CAACTACCTGTACAGGCTGTTCAGGAAGAGCAACCTGAAGCCCTTCG | |
| | AGAGGGACATCAGCACCGAGATCTACCAGGCCGGCAACAAGCCCTG | |
| | CAACGGCGTGGCCGGCTTCAACTGCTACTTCCCCCTGAGGAGCTAC | |
| | GGCTTCAGGCCCACCTACGGCGTGGGCCACCAGCCCTACAGGGTG | |
| | GTGGTGCTGAGCTTCGAGCTGCTGCACGCCCCCGCCACCGTGTGCG | |
| | GCCCCAAGAAGAGCACCAACCTGGTGAAGAACAAGTGCGTGAACTT | |
| | CAACTTCAACGGCCTGACCGGCACCGGCGTGCTGACCGAGAGCAAC | |
| | AAGAAGTTCCTGCCCTTCCAGCAGTTCGGCAGGGACATCGCCGACA | |
| | CCACCGACGCCGTGAGGGACCCCCAGACCCTGGAGATCCTGGACAT | |
| | CACCCCCTGCAGCTTCGGCGGCGTGAGCGTGATCACCCCCGGCACC | |
| | AACACCAGCAACCAGGTGGCCGTGCTGTACCAGGGCGTGAACTGCA | |
| | CCGAGGTGCCCGTGGCCATCCACGCCGACCAGCTGACCCCCACCTG | |
| | GAGGGTGTACAGCACCGGCAGCAACGTGTTCCAGACCAGGGCCGG | |
| | CTGCCTGATCGGCGCCGAGTACGTGAACAACAGCTACGAGTGCGAC | |
| | ATCCCCATCGGCGCCGGCATCTGCGCCAGCTACCAGACCCAGACCA | |
| | AGAGCCACCAGCAGGCCCAGAGCGTGGCCAGCCAGAGCATCATCG | |
| | CCTACACCATGAGCCTGGGCGCCGAGAACAGCGTGGCCTACAGCAA | |
| | CAACAGCATCGCCATCCCCACCAACTTCACCATCAGCGTGACCACCG | |
| | AGATCCTGCCCGTGAGCATGACCAAGACCAGCGTGGACTGCACCAT | |
| | GTACATCTGCGGCGACAGCACCGAGTGCAGCAACCTGCTGCTGCAG | |
| | TACGGCAGCTTCTGCACCCAGCTGAAGAGGGCCCTGACCGGCATCG | |
| | CCGTGGAGCAGGACAAGAACACCCAGGAGGTGTTCGCCCAGGTGAA | |
| | GCAGATCTACAAGACCCCCCCCATCAAGTACTTCGGCGGCTTCAACT | |
| | TCAGCCAGATCCTGCCCGACCCCAGCAAGCCCAGCAAGAGGAGCTT | |
| | CATCGAGGACCTGCTGTTCAACAAGGTGACCCTGGCCGACGCCGGC | |
| | TTCATCAAGCAGTACGGCGACTGCCTGGGCGACATCGCCGCCAGGG | |
| | ACCTGATCTGCGCCCAGAAGTTCAACGGCCTGACCGTGCTGCCCCC | |
| | CCTGCTGACCGACGAGATGATCGCCCAGTACACCAGCGCCCTGCTG | |
| | GCCGGCACCATCACCAGCGGCTGGACCTTCGGCGCCGGCGCCGCC | |
| | CTGCAGATCCCCTTCGCCATGCAGATGGCCTACAGGTTCAACGGCAT | |
| | CGGCGTGACCCAGAACGTGCTGTACGAGAACCAGAAGCTGATCGCC | |
| | AACCAGTTCAACAGCGCCATCGGCAAGATCCAGGACAGCCTGAGCA | |
| | GCACCGCCAGCGCCCTGGGCAAGCTGCAGGACGTGGTGAACCACA | |
| | ACGCCCAGGCCCTGAACACCCTGGTGAAGCAGCTGAGCAGCAAGTT | |
| | CGGCGCCATCAGCAGCGTGCTGAACGACATCCTGAGCAGGCTGGAC | |
| | CCCCCCGAGGCCGAGGTGCAGATCGACAGGCTGATCACCGGCAGG | |
| | CTGCAGAGCCTGCAGACCTACGTGACCCAGCAGCTGATCAGGGCCG | |
| | CCGAGATCAGGGCCAGCGCCAACCTGGCCGCCACCAAGATGAGCG | |
| | AGTGCGTGCTGGGCCAGAGCAAGAGGGTGGACTTCTGCGGCAAGG | |
| | GCTACCACCTGATGAGCTTCCCCCAGAGCGCCCCCCACGGCGTGGT | |
| | GTTCCTGCACGTGACCTACGTGCCCGCCCAGGAGAAGAACTTCACC | |
| | ACCGCCCCCGCCATCTGCCACGACGGCAAGGCCCACTTCCCCAGGG | |
| | AGGGCGTGTTCGTGAGCAACGGCACCCACTGGTTCGTGACCCAGAG | |
| | GAACTTCTACGAGCCCCAGATCATCACCACCGACAACACCTTCGTGA | |
| | GCGGCAACTGCGACGTGGTGATCGGCATCGTGAACAACACCGTGTA | |
| | CGACCCCCTGCAGCCCGAGCTGGACAGCTTCAAGGAGGAGCTGGAC | |
| | AAGTACTTCAAGAACCACACCAGCCCCGACGTGGACCTGGGCGACA | |
| | TCAGCGGCATCAACGCCAGCGTGGTGAACATCCAGAAGGAGATCGA | |
| | CAGGCTGAACGAGGTGGCCAAGAACCTGAACGAGAGCCTGATCGAC | |
| | CTGCAGGAGCTGGGCAAGTACGAGCAGTACATCAAGTGGCCCTGGT | |
| | ACATCTGGCTGGGCTTCATCGCCGGCCTGATCGCCATCGTGATGGT | |
| | GACCATCATGCTGTGCTGCATGACCAGCTGCTGCAGCTGCCTGAAG | |
| | GGCTGCTGCAGCTGCGGCAGCTGCTGCAAGTTCGACGAGGACGACA | |
| | GCGAGCCCGTGCTGAAGGGCGTGAAGCTGCACTACACCGGAAGCG | |
| | GAGCCACGAACTTCTCTCTGTTAAAGCAAGCAGGAGATGTTGAAGAA | |
| | AACCCCGGGCCTATGAAGGCAATACTAGTAGTTCTGCTATATACATTT | |
| | GCAACCGCAAATGCAGACACATTATGTATAGGTTATCATGCGAACAA | |
| | CTCAACAGACACTGTAGACACAGTACTAGAAAAGAATGTAACAGTAA | |
| | CACACTCTGTTAACCTTCTAGAAGACAAGCATAACGGGAAACTATGC | |
| | AAACTAAGAGGGGTAGCCCCATTGCATTTGGGTAAATGTAACATTGC | |
| | TGGCTGGATCCTGGGAAATCCAGAGTGTGAATCACTCTCCACAGCAA | |
| | GCTCATGGTCCTACATTGTGGAAACATCTAGTTCAGACAATGGAACG | |
| | TGTTACCCAGGAGATTTCATCGATTATGAGGAGCTAAGAGAGCAATT | |
| | GAGCTCAGTGTCATCATTTGAAAGGTTTGAGATATTCCCCAAGACAA | |
| | GTTCATGGCCCAATCATGACTCGAACAAAGGTGTAACGACAGCATGT | |
| | CCTCATGCTGGAGCAAAAAGCTTCTACAAAAATTTAATATGGCTAGTT | |
| | AAAAAAGGAAATTCATACCCAAAGCTCAGCAAATCCTACATTAATGAT | |
| | AAAGGGAAAGAAGTCCTCGTGCTATGGGGCATTCACCATCCACCTAC | |
| | TAGTGCTGACCAACAAAGTCTCTATCAGAATGCAGATGCATATGTTTT | |
| | TGTGGGGACATCAAGATACAGCAAGAAGTTCAAGCCGGAAATAGCAA | |
| | TAAGGCCCAAAGTGAGGGATCAAGAAGGGAGAATGAACTATTACTGG | |
| | ACACTAGTAGAGCCGGGAGACAAAATAACATTCGAAGCAACTGGAAA | |
| | TCTAGTGGTACCGAGATATGCATTCGCAATGGAAAGAAATGCTGGAT | |
| | CTGGTATTATCATTTCAGATACACCAGTCCACGATTGCAATACAACTT | |
| | GTCAGACACCCAAGGGTGCTATAAACACCAGCCTCCCATTTCAGAAC | |
| | ATACATCCGATCACAATTGGAAAATGTCCAAAATATGTAAAAAGCACA | |
| | AAATTGAGACTGGCCACAGGATTGAGGAATGTCCCGTCCATTCAATC | |
| | TAGAGGCCTATTTGGGGCCATTGCCGGTTTCATTGAAGGGGGGTGG | |
| | ACAGGGATGGTAGATGGATGGTACGGTTATCACCATCAAAATGAGCA | |
| | GGGGTCAGGATATGCAGCCGACCTGAAGAGCACACAGAATGCCATT | |
| | GACGAGATTACTAACAAAGTAAACTCTGTTATTGAAAAAATGAATACA | |
| | CAGTTCACAGCAGTAGGTAAAGAGTTCAACCACCTGGAAAAAAGAAT | |
| | AGAGAATTTAAATAAAAAAGTTGATGATGGTTTCCTGGACATTTGGAC | |
| | TTACAATGCCGAACTGTTGGTTCTATTGGAAAATGAAAGAACTTTGGA | |
| | CTACCACGATTCAAAGGTGAAGAACTTATATGAAAAGGTAAGAAGCC | |
| | AGTTAAAAAACAATGCCAAGGAAATTGGAAACGGCTGCTTTGAATTTT | |
| | ACCACAAATGTGATAACACGTGCATGGAAAGTGTCAAAAATGGGACT | |
| | TATGACTACCCAAAATACTCAGAGGAAGCAAAATTAAACAGAGAAGAA | |
| | ATAGATGGGGTAAAGCTGGAATCAACAAGGATTTACCAGATTTTGGC | |
| | GATCTATTCAACCGTCGCCAGTTCATTGGTACTGGTAGTCTCCCTGG | |
| | GGGCAATCAGTTTCTGGATGTGCTCTAATGGGTCTCTACAGTGTAGA | |
| | ATATGTATTTAAGGAAGCGGAGCCACGAACTTCTCTCTGTTAAAGCAA | |
| | GCAGGAGATGTTGAAGAAAACCCCGGGCCTAGCAAAAGCAGGGGAT | |
| | AATTCTATTAACCATGAAGACTATCATTGCTTTGAGCTACATTCTATGT | |
| | CTGGTTTTCGCTCAAAAACTTCCTGGAAATGACAATAGCACTGCAAC | |
| | GCTGTGCCTTGGGCACCATGCAGTACCAAACGGAACGATAGTGAAAA | |
| | CAATCACGAATGACCAAATTGAAGTTACTAATGCTACTGAGCTGGTTC | |
| | AGAATTCCTCAATAGGTGAAATATGCGACAGTCCTCATCAGATCCTTG | |
| | ATGGAGAAAACTGCACACTAATAGATGCTCTATTGGGAGACCCTCAG | |
| | TGTGATGGCTTTCAAAATAAGAAATGGGACCTTTTTGTTGAACGAAGC | |
| | AAAGCCTACAGCAACTGTTACCCTTATGATGTGCCGGATTATGCCTC | |
| | CCTTAGGTCACTAGTTGCCTCATCCGGCACACTGGAGTTTAACAATG | |
| | AAAGCTTCAATTGGGCTGGAGTCACTCAAAACGGAACAAGTTCTGCT | |
| | TGCATAAGGGGATCTAATAGTAGTTTCTTTAGTAGATTAAATTGGTTG | |
| | ACCCACTTAAACTTCAAGTACCCAGCATTGAACGTGACTATGCCAAAC | |
| | AATGAACAATTTGACAAATTGTACATTTGGGGGGTTCACCACCCGGG | |
| | TACGGACAAGGACCAAATCTTCCTGTATGCTCAATCATCAGGAAGAA | |
| | TCACAGTATCTACGAAAAGAAGCCAACAAGCTGTAATGCGGAATATC | |
| | GGATCTAGACCCAGAATAAGGAATATCCCTAGCAGAATAAGCATCTA | |
| | TTGGACAATAGTAAAACCGGGAGACATACTTTTGATTAACAGCACAG | |
| | GGAATCTAATTGCTCCTAGGGGTTACTTCAAAATACGAAGTGGGAAA | |
| | AGCTCAATAATGAGATCAGATGCACCCATTGGCAAATGCAAGTCTGA | |
| | ATGCATCACTCCAAATGGAAGCATTCCCAATGACAAACCATTCCAAAA | |
| | TGTAAACAGGATCACATACGGGGCCTGTCCCAGATATGTTAAGCAAA | |
| | GCACTCTGAAATTGGCAACAGGAATGCGAAATGTACCAGAGAAACAA | |
| | ACTAGAGGCATATTTGGCGCAATAGCGGGTTTCATAGAAAATGGTTG | |
| | GGAGGGAATGGTGGATGGTTGGTACGGTTTCAGGCATCAAAATTCTG | |
| | AGGGAAGAGGACAAGCAGCAGATCTCAAAAGCACTCAAGCAGCAAT | |
| | CGATCAAATCAATGGGAAGCTGAATCGATTGATCGGGAAAACCAACG | |
| | AGAAATTCCATCAGATTGAGAAAGAATTCTCAGAAGTAGAAGGGAGA | |
| | ATTCAGGACCTTGAGAAATATGTTGAGGACACAAAAATAGATCTCTGG | |
| | TCATACAACGCAGAGCTTCTTGTTGCCCTGGAAAACCAACATACAATT | |
| | GATCTAACTGACTCAGAAATGAACAAACTGTTTGAAAAAACAAAGAAG | |
| | CAACTGAGGGAAAATGCTGAGGATATGGGCAATGGTTGTTTCAAAAT | |
| | ATACCACAAATGTGACAATGCCTGCATAGGATCAATCAGAAATGGAA | |
| | CTTATGACCACGATGTATACAGGGATGAAGCATTAAACAACCGGTTC | |
| | CAGATCAAGGGAGTTGAGCTGAAGTCAGGGTACAAAGATTGGATCCT | |
| | ATGGATTTCCTTTGCCATATCATGTTTTTTGCTTTGTGTTGCTTTGTTG | |
| | GGGTTCATCATGTGGGCCTGCCAAAAGGGCAACATTAGGTGCAACAT | |
| | TTGCATTTGAGTGCATTAATTAAAAACACCCTTGTTTCTACTGGAAGC | |
| | GGAGCCACGAACTTCTCTCTGTTAAAGCAAGCAGGAGATGTTGAAGA | |
| | AAACCCCGGGCCTATTTTCTAATATCCACAAAATGAAGGCAATAATTG | |
| | TACTACTCATGGTAGTAACATCCAATGCAGATCGAATCTGCACTGGG | |
| | ATAACATCGTCAAACTCACCACATGTCGTCAAAACTGCTACTCAAGG | |
| | GGAGGTCAACGTGACCGGTGTAATACCACTGACAACAACACCCACCA | |
| | AATCTCATTTTGCAAATCTCAAAGGAACAGAAACCAGGGGGAAACTAT | |
| | GCCCAAAATGCCTCAACTGCACAGATCTGGATGTAGCCTTGGGCAGA | |
| | CCAAAATGCACAGGGAAAATACCCTCTGCAAGGGTTTCAATACTCCA | |
| | TGAAGTCAGACCTGTTACATCTGGGTGCTTTCCTATAATGCACGATAG | |
| | AACAAAAATTAGACAGCTGCCTAACCTTCTCCGAGGATACGAACATG | |
| | TCAGGTTATCAACTCACAACGTTATCAATGCAAAAGATGCACCAGGAA | |
| | GACCCTACGAAATTGGAACCTCAGGGTCTTGCCCTAACATTACCAAT | |
| | GGAAACGGATTCTTCGCAACAATGGCTTGGGCCGTCCCAAAAAACAA | |
| | AACAGCAACAAATCCATTAACAATAGAAGTACCATACATTTGTACAGA | |
| | AGGAGAAGACCAAATTACCGTTTGGGGGTTCCACTCTGACAACGAGA | |
| | CCCAAATGGCAAAGCTCTATGGGGACTCAAAGCCCCAGAAGTTCACC | |
| | TCATCTGCCAACGGAGTGACCACACATTACGTTTCACAGATTGGTGG | |
| | CTTCCCAAATCAAACAGAAGACGGAGGACTACCACAAAGTGGCAGAA | |
| | TTGTTGTTGATTACATGGTGCAGAAATCTGGAAAAACAGGAACAATTA | |
| | CCTATCAAAGAGGTATTTTATTGCCTCAAAAAGTGTGGTGCGCAAGT | |
| | GGCAGGAGCAAGGTAATAAAAGGATCCTTGCCCTTAATTGGAGAAGC | |
| | AGATTGCCTCCATGAAAAATACGGTGGATTAAACAAAAGCAAGCCTTA | |
| | CTACACAGGGGAACATGCAAAGGCCATAGGAAATTGCCCAATATGGG | |
| | TGAAAACACCCTTGAAGCTGGCCAATGGAACCAAATATAGACCCCCT | |
| | GCAAAACTATTAAAGGAAAGAGGTTTCTTCGGAGCCATTGCTGGTTT | |
| | CTTAGAGGGAGGATGGGAAGGAATGATTGCAGGTTGGCACGGATAC | |
| | ACATCCCATGGGGCACATGGAGTAGCGGTGGCAGCTGACCTTAAGA | |
| | GCACTCAAGAGGCCATAAACAAGATAACAAAAAATCTCAACTCTTTGA | |
| | GTGAGCTGGAAGTAAAGAATCTTCAAAGACTAAGCGGTGCCATGGAT | |
| | GAACTCCACAACGAAATACTAGAACTAGATGAGAAAGTGGATGATCT | |
| | CAGAGCTGACACAATAAGCTCACAAATAGAACTCGCAGTCCTGCTTT | |
| | CCAATGAAGGAATAATAAACAGTGAAGATGAACATCTCTTGGCGCTT | |
| | GAAAGAAAGCTGAAGAAAATGCTGGGCCCCTCTGCTGTAGAGATAG | |
| | GGAATGGATGCTTTGAAACCAAACACAAGTGCAACCAGACCTGCCTC | |
| | GACAGAATAGCTGCTGGTACCTTTGATGCAGGAGAATTTTCTCTCCC | |
| | CACCTTTGATTCACTGAATATTACTGCTGCATCTTTAAATGACGACGG | |
| | ATTGGACAATCATACTATACTGCTTTACTACTCAACTGCTGCCTCCAG | |
| | TTTGGCTGTAACACTGATGATAGCTATCTTTGTTGTTTATATGGTCTC | |
| | CAGAGACAATGTTTCTTGCTCCATTTGTCTATAAGGAAAGTTAAGCCC | |
| | TGTATTTTCCTTTATTGTAGTGCTTGTTTGCTTGTTGTCATTACAAAGA | |
| | AACGTTATTGAAAAATGGAAGCGGAGCCACGAACTTCTCTCTGTTAAA | |
| | GCAAGCAGGAGATGTTGAAGAAAACCCCGGGCCTTTCGGAGCTATT | |
| | GCTGGTTTCTTGGAAGGAGGATGGGAAGGAATGATTGCAGGTTGGC | |
| | ACGGATACACATCTCATGGAGCACATGGAGTAGCAGTGGCAGCAGA | |
| | CCTTAAGAGTACCCATGATGACTCGAGCTGGTACTGCATGCACGCAA | |
| | TGCTAGCTGCCCCTTTCCCGTCCTGGGTACCCCGAGTCTCCCCCGA | |
| | CCTCGGGTCCCAGGTATGCTCCCACCTCCACCTGCCCCACTCACCA | |
| | CCTCTGCTAGTTCCAGACACCTCCCAAGCACGCAGCAATGCAGCTCA | |
| | AAACGCTTAGCCTAGCCACACCCCCACGGGAAACAGCAGTGATTAAC | |
| | CTTTAGCAATAAACGAAAGTTTAACTAAGCTATACTAACCCCAGGGTT | |
| | GGTCAATTTCGTGCCAGCCACACCCTGGAGCTAGCAAAAAAAA | |
| Pan-CoV-Flu | TAGTTATTAATAGTAATCAATTACGGGGTCATTAGTTCATAGCCCATAT | 399 |
| Vaccine #11 | ATGGAGTTCCGCGTTACATAACTTACGGTAAATGGCCCGCCTGGCTG | |
| CoV-Wuhan | ACCGCCCAACGACCCCCGCCCATTGACGTCAATAATGACGTATGTTC | |
| Spike(HexaPro)- | CCATAGTAACGCCAATAGGGACTTTCCATTGACGTCAATGGGTGGAG | |
| Influenza (HA) | TATTTACGGTAAACTGCCCACTTGGCAGTACATCAAGTGTATCATATG | |
| | CCAAGTACGCCCCCTATTGACGTCAATGACGGTAAATGGCCCGCCTG | |
| | GCATTATGCCCAGTACATGACCTTATGGGACTTTCCTACTTGGCAGTA | |
| | CATCTACGTATTAGTCATCGCTATTACCATGGTGATGCGGTTTTGGCA | |
| | GTACATCAATGGGCGTGGATAGCGGTTTGACTCACGGGGATTTCCAA | |
| | GTCTCCACCCCATTGACGTCAATGGGAGTTTGTTTTGGCACCAAAAT | |
| | CAACGGGACTTTCCAAAATGTCGTAACAACTCCGCCCCATTGACGCA | |
| | AATGGGCGGTAGGCGTGTACGGTGGGAGGTCTATATAAGCAGAGCT | |
| | GGTTTAGTGAACCGTCAGATCGAGAATAAACTAGTATTCTTCTGGTCC | |
| | CCACAGACTCAGAGAGAACCCGCCACCATGTTCGTGTTCCTGGTGCT | |
| | GCTGCCCCTGGTGAGCAGCCAGTGCGTGAACCTGACCACCAGGACC | |
| | CAGCTGCCCCCCGCCTACACCAACAGCTTCACCAGGGGCGTGTACT | |
| | ACCCCGACAAGGTGTTCAGGAGCAGCGTGCTGCACAGCACCCAGGA | |
| | CCTGTTCCTGCCCTTCTTCAGCAACGTGACCTGGTTCCACGCCATCC | |
| | ACGTGAGCGGCACCAACGGCACCAAGAGGTTCGACAACCCCGTGCT | |
| | GCCCTTCAACGACGGCGTGTACTTCGCCAGCACCGAGAAGAGCAAC | |
| | ATCATCAGGGGCTGGATCTTCGGCACCACCCTGGACAGCAAGACCC | |
| | AGAGCCTGCTGATCGTGAACAACGCCACCAACGTGGTGATCAAGGT | |
| | GTGCGAGTTCCAGTTCTGCAACGACCCCTTCCTGGGCGTGTACTACC | |
| | ACAAGAACAACAAGAGCTGGATGGAGAGCGAGTTCAGGGTGTACAG | |
| | CAGCGCCAACAACTGCACCTTCGAGTACGTGAGCCAGCCCTTCCTG | |
| | ATGGACCTGGAGGGCAAGCAGGGCAACTTCAAGAACCTGAGGGAGT | |
| | TCGTGTTCAAGAACATCGACGGCTACTTCAAGATCTACAGCAAGCAC | |
| | ACCCCCATCAACCTGGTGAGGGACCTGCCCCAGGGCTTCAGCGCCC | |
| | TGGAGCCCCTGGTGGACCTGCCCATCGGCATCAACATCACCAGGTT | |
| | CCAGACCCTGCTGGCCCTGCACAGGAGCTACCTGACCCCCGGCGAC | |
| | AGCAGCAGCGGCTGGACCGCCGGCGCCGCCGCCTACTACGTGGGC | |
| | TACCTGCAGCCCAGGACCTTCCTGCTGAAGTACAACGAGAACGGCA | |
| | CCATCACCGACGCCGTGGACTGCGCCCTGGACCCCCTGAGCGAGAC | |
| | CAAGTGCACCCTGAAGAGCTTCACCGTGGAGAAGGGCATCTACCAG | |
| | ACCAGCAACTTCAGGGTGCAGCCCACCGAGAGCATCGTGAGGTTCC | |
| | CCAACATCACCAACCTGTGCCCCTTCGGCGAGGTGTTCAACGCCAC | |
| | CAGGTTCGCCAGCGTGTACGCCTGGAACAGGAAGAGGATCAGCAAC | |
| | TGCGTGGCCGACTACAGCGTGCTGTACAACAGCGCCAGCTTCAGCA | |
| | CCTTCAAGTGCTACGGCGTGAGCCCCACCAAGCTGAACGACCTGTG | |
| | CTTCACCAACGTGTACGCCGACAGCTTCGTGATCAGGGGCGACGAG | |
| | GTGAGGCAGATCGCCCCCGGCCAGACCGGCAAGATCGCCGACTACA | |
| | ACTACAAGCTGCCCGACGACTTCACCGGCTGCGTGATCGCCTGGAA | |
| | CAGCAACAACCTGGACAGCAAGGTGGGCGGCAACTACAACTACCTG | |
| | TACAGGCTGTTCAGGAAGAGCAACCTGAAGCCCTTCGAGAGGGACA | |
| | TCAGCACCGAGATCTACCAGGCCGGCAGCACCCCCTGCAACGGCGT | |
| | GGAGGGCTTCAACTGCTACTTCCCCCTGCAGAGCTACGGCTTCCAG | |
| | CCCACCAACGGCGTGGGCTACCAGCCCTACAGGGTGGTGGTGCTGA | |
| | GCTTCGAGCTGCTGCACGCCCCCGCCACCGTGTGCGGCCCCAAGAA | |
| | GAGCACCAACCTGGTGAAGAACAAGTGCGTGAACTTCAACTTCAACG | |
| | GCCTGACCGGCACCGGCGTGCTGACCGAGAGCAACAAGAAGTTCCT | |
| | GCCCTTCCAGCAGTTCGGCAGGGACATCGCCGACACCACCGACGCC | |
| | GTGAGGGACCCCCAGACCCTGGAGATCCTGGACATCACCCCCTGCA | |
| | GCTTCGGCGGCGTGAGCGTGATCACCCCCGGCACCAACACCAGCAA | |
| | CCAGGTGGCCGTGCTGTACCAGGACGTGAACTGCACCGAGGTGCCC | |
| | GTGGCCATCCACGCCGACCAGCTGACCCCCACCTGGAGGGTGTACA | |
| | GCACCGGCAGCAACGTGTTCCAGACCAGGGCCGGCTGCCTGATCG | |
| | GCGCCGAGCACGTGAACAACAGCTACGAGTGCGACATCCCCATCGG | |
| | CGCCGGCATCTGCGCCAGCTACCAGACCCAGACCAACAGCCCCGGC | |
| | AGCGCCAGCAGCGTGGCCAGCCAGAGCATCATCGCCTACACCATGA | |
| | GCCTGGGCGCCGAGAACAGCGTGGCCTACAGCAACAACAGCATCGC | |
| | CATCCCCACCAACTTCACCATCAGCGTGACCACCGAGATCCTGCCCG | |
| | TGAGCATGACCAAGACCAGCGTGGACTGCACCATGTACATCTGCGG | |
| | CGACAGCACCGAGTGCAGCAACCTGCTGCTGCAGTACGGCAGCTTC | |
| | TGCACCCAGCTGAACAGGGCCCTGACCGGCATCGCCGTGGAGCAG | |
| | GACAAGAACACCCAGGAGGTGTTCGCCCAGGTGAAGCAGATCTACA | |
| | AGACCCCCCCCATCAAGGACTTCGGCGGCTTCAACTTCAGCCAGATC | |
| | CTGCCCGACCCCAGCAAGCCCAGCAAGAGGAGCCCCATCGAGGAC | |
| | CTGCTGTTCAACAAGGTGACCCTGGCCGACGCCGGCTTCATCAAGC | |
| | AGTACGGCGACTGCCTGGGCGACATCGCCGCCAGGGACCTGATCTG | |
| | CGCCCAGAAGTTCAACGGCCTGACCGTGCTGCCCCCCCTGCTGACC | |
| | GACGAGATGATCGCCCAGTACACCAGCGCCCTGCTGGCCGGCACCA | |
| | TCACCAGCGGCTGGACCTTCGGCGCCGGCCCCGCCCTGCAGATCC | |
| | CCTTCCCCATGCAGATGGCCTACAGGTTCAACGGCATCGGCGTGAC | |
| | CCAGAACGTGCTGTACGAGAACCAGAAGCTGATCGCCAACCAGTTCA | |
| | ACAGCGCCATCGGCAAGATCCAGGACAGCCTGAGCAGCACCCCCAG | |
| | CGCCCTGGGCAAGCTGCAGGACGTGGTGAACCAGAACGCCCAGGC | |
| | CCTGAACACCCTGGTGAAGCAGCTGAGCAGCAACTTCGGCGCCATC | |
| | AGCAGCGTGCTGAACGACATCCTGAGCAGGCTGGACCCCCCCGAGG | |
| | CCGAGGTGCAGATCGACAGGCTGATCACCGGCAGGCTGCAGAGCCT | |
| | GCAGACCTACGTGACCCAGCAGCTGATCAGGGCCGCCGAGATCAGG | |
| | GCCAGCGCCAACCTGGCCGCCACCAAGATGAGCGAGTGCGTGCTG | |
| | GGCCAGAGCAAGAGGGTGGACTTCTGCGGCAAGGGCTACCACCTGA | |
| | TGAGCTTCCCCCAGAGCGCCCCCCACGGCGTGGTGTTCCTGCACGT | |
| | GACCTACGTGCCCGCCCAGGAGAAGAACTTCACCACCGCCCCCGCC | |
| | ATCTGCCACGACGGCAAGGCCCACTTCCCCAGGGAGGGCGTGTTCG | |
| | TGAGCAACGGCACCCACTGGTTCGTGACCCAGAGGAACTTCTACGA | |
| | GCCCCAGATCATCACCACCGACAACACCTTCGTGAGCGGCAACTGC | |
| | GACGTGGTGATCGGCATCGTGAACAACACCGTGTACGACCCCCTGC | |
| | AGCCCGAGCTGGACAGCTTCAAGGAGGAGCTGGACAAGTACTTCAA | |
| | GAACCACACCAGCCCCGACGTGGACCTGGGCGACATCAGCGGCATC | |
| | AACGCCAGCGTGGTGAACATCCAGAAGGAGATCGACAGGCTGAACG | |
| | AGGTGGCCAAGAACCTGAACGAGAGCCTGATCGACCTGCAGGAGCT | |
| | GGGCAAGTACGAGCAGTACATCAAGTGGCCCTGGTACATCTGGCTG | |
| | GGCTTCATCGCCGGCCTGATCGCCATCGTGATGGTGACCATCATGCT | |
| | GTGCTGCATGACCAGCTGCTGCAGCTGCCTGAAGGGCTGCTGCAGC | |
| | TGCGGCAGCTGCTGCAAGTTCGACGAGGACGACAGCGAGCCCGTG | |
| | CTGAAGGGCGTGAAGCTGCACTACACCGGAAGCGGAGCCACGAACT | |
| | TCTCTCTGTTAAAGCAAGCAGGAGATGTTGAAGAAAACCCCGGGCCT | |
| | ATGAAGGCAATACTAGTAGTTCTGCTATATACATTTGCAACCGCAAAT | |
| | GCAGACACATTATGTATAGGTTATCATGCGAACAACTCAACAGACACT | |
| | GTAGACACAGTACTAGAAAAGAATGTAACAGTAACACACTCTGTTAAC | |
| | CTTCTAGAAGACAAGCATAACGGGAAACTATGCAAACTAAGAGGGGT | |
| | AGCCCCATTGCATTTGGGTAAATGTAACATTGCTGGCTGGATCCTGG | |
| | GAAATCCAGAGTGTGAATCACTCTCCACAGCAAGCTCATGGTCCTAC | |
| | ATTGTGGAAACATCTAGTTCAGACAATGGAACGTGTTACCCAGGAGA | |
| | TTTCATCGATTATGAGGAGCTAAGAGAGCAATTGAGCTCAGTGTCAT | |
| | CATTTGAAAGGTTTGAGATATTCCCCAAGACAAGTTCATGGCCCAATC | |
| | ATGACTCGAACAAAGGTGTAACGACAGCATGTCCTCATGCTGGAGCA | |
| | AAAAGCTTCTACAAAAATTTAATATGGCTAGTTAAAAAAGGAAATTCAT | |
| | ACCCAAAGCTCAGCAAATCCTACATTAATGATAAAGGGAAAGAAGTC | |
| | CTCGTGCTATGGGGCATTCACCATCCACCTACTAGTGCTGACCAACA | |
| | AAGTCTCTATCAGAATGCAGATGCATATGTTTTTGTGGGGACATCAAG | |
| | ATACAGCAAGAAGTTCAAGCCGGAAATAGCAATAAGGCCCAAAGTGA | |
| | GGGATCAAGAAGGGAGAATGAACTATTACTGGACACTAGTAGAGCCG | |
| | GGAGACAAAATAACATTCGAAGCAACTGGAAATCTAGTGGTACCGAG | |
| | ATATGCATTCGCAATGGAAAGAAATGCTGGATCTGGTATTATCATTTC | |
| | AGATACACCAGTCCACGATTGCAATACAACTTGTCAGACACCCAAGG | |
| | GTGCTATAAACACCAGCCTCCCATTTCAGAACATACATCCGATCACAA | |
| | TTGGAAAATGTCCAAAATATGTAAAAAGCACAAAATTGAGACTGGCCA | |
| | CAGGATTGAGGAATGTCCCGTCCATTCAATCTAGAGGCCTATTTGGG | |
| | GCCATTGCCGGTTTCATTGAAGGGGGGTGGACAGGGATGGTAGATG | |
| | GATGGTACGGTTATCACCATCAAAATGAGCAGGGGTCAGGATATGCA | |
| | GCCGACCTGAAGAGCACACAGAATGCCATTGACGAGATTACTAACAA | |
| | AGTAAACTCTGTTATTGAAAAAATGAATACACAGTTCACAGCAGTAGG | |
| | TAAAGAGTTCAACCACCTGGAAAAAAGAATAGAGAATTTAAATAAAAA | |
| | AGTTGATGATGGTTTCCTGGACATTTGGACTTACAATGCCGAACTGTT | |
| | GGTTCTATTGGAAAATGAAAGAACTTTGGACTACCACGATTCAAAGGT | |
| | GAAGAACTTATATGAAAAGGTAAGAAGCCAGTTAAAAAACAATGCCAA | |
| | GGAAATTGGAAACGGCTGCTTTGAATTTTACCACAAATGTGATAACAC | |
| | GTGCATGGAAAGTGTCAAAAATGGGACTTATGACTACCCAAAATACT | |
| | CAGAGGAAGCAAAATTAAACAGAGAAGAAATAGATGGGGTAAAGCTG | |
| | GAATCAACAAGGATTTACCAGATTTTGGCGATCTATTCAACCGTCGCC | |
| | AGTTCATTGGTACTGGTAGTCTCCCTGGGGGCAATCAGTTTCTGGAT | |
| | GTGCTCTAATGGGTCTCTACAGTGTAGAATATGTATTTAAGGAAGCG | |
| | GAGCCACGAACTTCTCTCTGTTAAAGCAAGCAGGAGATGTTGAAGAA | |
| | AACCCCGGGCCTAGCAAAAGCAGGGGATAATTCTATTAACCATGAAG | |
| | ACTATCATTGCTTTGAGCTACATTCTATGTCTGGTTTTCGCTCAAAAA | |
| | CTTCCTGGAAATGACAATAGCACTGCAACGCTGTGCCTTGGGCACCA | |
| | TGCAGTACCAAACGGAACGATAGTGAAAACAATCACGAATGACCAAA | |
| | TTGAAGTTACTAATGCTACTGAGCTGGTTCAGAATTCCTCAATAGGTG | |
| | AAATATGCGACAGTCCTCATCAGATCCTTGATGGAGAAAACTGCACA | |
| | CTAATAGATGCTCTATTGGGAGACCCTCAGTGTGATGGCTTTCAAAAT | |
| | AAGAAATGGGACCTTTTTGTTGAACGAAGCAAAGCCTACAGCAACTG | |
| | TTACCCTTATGATGTGCCGGATTATGCCTCCCTTAGGTCACTAGTTGC | |
| | CTCATCCGGCACACTGGAGTTTAACAATGAAAGCTTCAATTGGGCTG | |
| | GAGTCACTCAAAACGGAACAAGTTCTGCTTGCATAAGGGGATCTAAT | |
| | AGTAGTTTCTTTAGTAGATTAAATTGGTTGACCCACTTAAACTTCAAGT | |
| | ACCCAGCATTGAACGTGACTATGCCAAACAATGAACAATTTGACAAAT | |
| | TGTACATTTGGGGGGTTCACCACCCGGGTACGGACAAGGACCAAAT | |
| | CTTCCTGTATGCTCAATCATCAGGAAGAATCACAGTATCTACCAAAAG | |
| | AAGCCAACAAGCTGTAATCCCGAATATCGGATCTAGACCCAGAATAA | |
| | GGAATATCCCTAGCAGAATAAGCATCTATTGGACAATAGTAAAACCG | |
| | GGAGACATACTTTTGATTAACAGCACAGGGAATCTAATTGCTCCTAG | |
| | GGGTTACTTCAAAATACGAAGTGGGAAAAGCTCAATAATGAGATCAG | |
| | ATGCACCCATTGGCAAATGCAAGTCTGAATGCATCACTCCAAATGGA | |
| | AGCATTCCCAATGACAAACCATTCCAAAATGTAAACAGGATCACATAC | |
| | GGGGCCTGTCCCAGATATGTTAAGCAAAGCACTCTGAAATTGGCAAC | |
| | AGGAATGCGAAATGTACCAGAGAAACAAACTAGAGGCATATTTGGCG | |
| | CAATAGCGGGTTTCATAGAAAATGGTTGGGAGGGAATGGTGGATGGT | |
| | TGGTACGGTTTCAGGCATCAAAATTCTGAGGGAAGAGGACAAGCAGC | |
| | AGATCTCAAAAGCACTCAAGCAGCAATCGATCAAATCAATGGGAAGC | |
| | TGAATCGATTGATCGGGAAAACCAACGAGAAATTCCATCAGATTGAG | |
| | AAAGAATTCTCAGAAGTAGAAGGGAGAATTCAGGACCTTGAGAAATA | |
| | TGTTGAGGACACAAAAATAGATCTCTGGTCATACAACGCAGAGCTTC | |
| | TTGTTGCCCTGGAAAACCAACATACAATTGATCTAACTGACTCAGAAA | |
| | TGAACAAACTGTTTGAAAAAACAAAGAAGCAACTGAGGGAAAATGCT | |
| | GAGGATATGGGCAATGGTTGTTTCAAAATATACCACAAATGTGACAAT | |
| | GCCTGCATAGGATCAATCAGAAATGGAACTTATGACCACGATGTATA | |
| | CAGGGATGAAGCATTAAACAACCGGTTCCAGATCAAGGGAGTTGAGC | |
| | TGAAGTCAGGGTACAAAGATTGGATCCTATGGATTTCCTTTGCCATAT | |
| | CATGTTTTTTGCTTTGTGTTGCTTTGTTGGGGTTCATCATGTGGGCCT | |
| | GCCAAAAGGGCAACATTAGGTGCAACATTTGCATTTGAGTGCATTAAT | |
| | TAAAAACACCCTTGTTTCTACTGGAAGCGGAGCCACGAACTTCTCTCT | |
| | GTTAAAGCAAGCAGGAGATGTTGAAGAAAACCCCGGGCCTATTTTCT | |
| | AATATCCACAAAATGAAGGCAATAATTGTACTACTCATGGTAGTAACA | |
| | TCCAATGCAGATCGAATCTGCACTGGGATAACATCGTCAAACTCACC | |
| | ACATGTCGTCAAAACTGCTACTCAAGGGGAGGTCAACGTGACCGGT | |
| | GTAATACCACTGACAACAACACCCACCAAATCTCATTTTGCAAATCTC | |
| | AAAGGAACAGAAACCAGGGGGAAACTATGCCCAAAATGCCTCAACTG | |
| | CACAGATCTGGATGTAGCCTTGGGCAGACCAAAATGCACAGGGAAAA | |
| | TACCCTCTGCAAGGGTTTCAATACTCCATGAAGTCAGACCTGTTACAT | |
| | CTGGGTGCTTTCCTATAATGCACGATAGAACAAAAATTAGACAGCTG | |
| | CCTAACCTTCTCCGAGGATACGAACATGTCAGGTTATCAACTCACAA | |
| | CGTTATCAATGCAAAAGATGCACCAGGAAGACCCTACGAAATTGGAA | |
| | CCTCAGGGTCTTGCCCTAACATTACCAATGGAAACGGATTCTTCGCA | |
| | ACAATGGCTTGGGCCGTCCCAAAAAACAAAACAGCAACAAATCCATT | |
| | AACAATAGAAGTACCATACATTTTACAGAAGGAGAAGACCAAATTAC | |
| | CGTTTGGGGGTTCCACTCTGACAACGAGACCCAAATGGCAAAGCTCT | |
| | ATGGGGACTCAAAGCCCCAGAAGTTCACCTCATCTGCCAACGGAGT | |
| | GACCACACATTACGTTTCACAGATTGGTGGCTTCCCAAATCAAACAG | |
| | AAGACGGAGGACTACCACAAAGTGGCAGAATTGTTGTTGATTACATG | |
| | GTGCAGAAATCTGGAAAAACAGGAACAATTACCTATCAAAGAGGTATT | |
| | TTATTGCCTCAAAAAGTGTGGTGCGCAAGTGGCAGGAGCAAGGTAAT | |
| | AAAAGGATCCTTGCCCTTAATTGGAGAAGCAGATTGCCTCCATGAAA | |
| | AATACGGTGGATTAAACAAAAGCAAGCCTTACTACACAGGGGAACAT | |
| | GCAAAGGCCATAGGAAATTGCCCAATATGGGTGAAAACACCCTTGAA | |
| | GCTGGCCAATGGAACCAAATATAGACCCCCTGCAAAACTATTAAAGG | |
| | AAAGAGGTTTCTTCGGAGCCATTGCTGGTTTCTTAGAGGGAGGATGG | |
| | GAAGGAATGATTGCAGGTTGGCACGGATACACATCCCATGGGGCAC | |
| | ATGGAGTAGCGGTGGCAGCTGACCTTAAGAGCACTCAAGAGGCCAT | |
| | AAACAAGATAACAAAAAATCTCAACTCTTTGAGTGAGCTGGAAGTAAA | |
| | GAATCTTCAAAGACTAAGCGGTGCCATGGATGAACTCCACAACGAAA | |
| | TACTAGAACTAGATGAGAAAGTGGATGATCTCAGAGCTGACACAATA | |
| | AGCTCACAAATAGAACTCGCAGTCCTGCTTTCCAATGAAGGAATAATA | |
| | AACAGTGAAGATGAACATCTCTTGGCGCTTGAAAGAAAGCTGAAGAA | |
| | AATGCTGGGCCCCTCTGCTGTAGAGATAGGGAATGGATGCTTTGAAA | |
| | CCAAACACAAGTGCAACCAGACCTGCCTCGACAGAATAGCTGCTGGT | |
| | ACCTTTGATGCAGGAGAATTTTCTCTCCCCACCTTTGATTCACTGAAT | |
| | ATTACTGCTGCATCTTTAAATGACGACGGATTGGACAATCATACTATA | |
| | CTGCTTTACTACTCAACTGCTGCCTCCAGTTTGGCTGTAACACTGATG | |
| | ATAGCTATCTTTGTTGTTTATATGGTCTCCAGAGACAATGTTTCTTGCT | |
| | CCATTTGTCTATAAGGAAAGTTAAGCCCTGTATTTTCCTTTATTGTAGT | |
| | GCTTGTTTGCTTGTTGTCATTACAAAGAAACGTTATTGAAAAATGGAA | |
| | GCGGAGCCACGAACTTCTCTCTGTTAAAGCAAGCAGGAGATGTTGAA | |
| | GAAAACCCCGGGCCTTTCGGAGCTATTGCTGGTTTCTTGGAAGGAG | |
| | GATGGGAAGGAATGATTGCAGGTTGGCACGGATACACATCTCATGGA | |
| | GCACATGGAGTAGCAGTGGCAGCAGACCTTAAGAGTACCCATGATG | |
| | ACTCGAGCTGGTACTGCATGCACGCAATGCTAGCTGCCCCTTTCCCG | |
| | TCCTGGGTACCCCGAGTCTCCCCCGACCTCGGGTCCCAGGTATGCT | |
| | CCCACCTCCACCTGCCCCACTCACCACCTCTGCTAGTTCCAGACACC | |
| | TCCCAAGCACGCAGCAATGCAGCTCAAAACGCTTAGCCTAGCCACAC | |
| | CCCCACGGGAAACAGCAGTGATTAACCTTTAGCAATAAACGAAAGTT | |
| | TAACTAAGCTATACTAACCCCAGGGTTGGTCAATTTCGTGCCAGCCA | |
| | CACCCTGGAGCTAGCAAAAAAAA | |
| Pan-CoV-Flu | TAGTTATTAATAGTAATCAATTACGGGGTCATTAGTTCATAGCCCATAT | 400 |
| Vaccine #12 | ATGGAGTTCCGCGTTACATAACTTACGGTAAATGGCCCGCCTGGCTG | |
| CoV-Wuhan | ACCGCCCAACGACCCCCGCCCATTGACGTCAATAATGACGTATGTTC | |
| Spike(2 proline | CCATAGTAACGCCAATAGGGACTTTCCATTGACGTCAATGGGTGGAG | |
| substitution)- | TATTTACGGTAAACTGCCCACTTGGCAGTACATCAAGTGTATCATATG | |
| influenza (HA) | CCAAGTACGCCCCCTATTGACGTCAATGACGGTAAATGGCCCGCCTG | |
| | GCATTATGCCCAGTACATGACCTTATGGGACTTTCCTACTTGGCAGTA | |
| | CATCTACGTATTAGTCATCGCTATTACCATGGTGATGCGGTTTTGGCA | |
| | GTACATCAATGGGCGTGGATAGCGGTTTGACTCACGGGGATTTCCAA | |
| | GTCTCCACCCCATTGACGTCAATGGGAGTTTGTTTTGGCACCAAAAT | |
| | CAACGGGACTTTCCAAAATGTCGTAACAACTCCGCCCCATTGACGCA | |
| | AATGGGCGGTAGGCGTGTACGGTGGGAGGTCTATATAAGCAGAGCT | |
| | GGTTTAGTGAACCGTCAGATCGAGAATAAACTAGTATTCTTCTGGTCC | |
| | CCACAGACTCAGAGAGAACCCGCCACCATGTTCGTGTTCCTGGTGCT | |
| | GCTGCCCCTGGTGAGCAGCCAGTGCGTGAACCTGACCACCAGGACC | |
| | CAGCTGCCCCCCGCCTACACCAACAGCTTCACCAGGGGCGTGTACT | |
| | ACCCCGACAAGGTGTTCAGGAGCAGCGTGCTGCACAGCACCCAGGA | |
| | CCTGTTCCTGCCCTTCTTCAGCAACGTGACCTGGTTCCACGCCATCC | |
| | ACGTGAGCGGCACCAACGGCACCAAGAGGTTCGACAACCCCGTGCT | |
| | GCCCTTCAACGACGGCGTGTACTTCGCCAGCACCGAGAAGAGCAAC | |
| | ATCATCAGGGGCTGGATCTTCGGCACCACCCTGGACAGCAAGACCC | |
| | AGAGCCTGCTGATCGTGAACAACGCCACCAACGTGGTGATCAAGGT | |
| | GTGCGAGTTCCAGTTCTGCAACGACCCCTTCCTGGGCGTGTACTACC | |
| | ACAAGAACAACAAGAGCTGGATGGAGAGCGAGTTCAGGGTGTACAG | |
| | CAGCGCCAACAACTGCACCTTCGAGTACGTGAGCCAGCCCTTCCTG | |
| | ATGGACCTGGAGGGCAAGCAGGGCAACTTCAAGAACCTGAGGGAGT | |
| | TCGTGTTCAAGAACATCGACGGCTACTTCAAGATCTACAGCAAGCAC | |
| | ACCCCCATCAACCTGGTGAGGGACCTGCCCCAGGGCTTCAGCGCCC | |
| | TGGAGCCCCTGGTGGACCTGCCCATCGGCATCAACATCACCAGGTT | |
| | CCAGACCCTGCTGGCCCTGCACAGGAGCTACCTGACCCCCGGCGAC | |
| | AGCAGCAGCGGCTGGACCGCCGGCGCCGCCGCCTACTACGTGGGC | |
| | TACCTGCAGCCCAGGACCTTCCTGCTGAAGTACAACGAGAACGGCA | |
| | CCATCACCGACGCCGTGGACTGCGCCCTGGACCCCCTGAGCGAGAC | |
| | CAAGTGCACCCTGAAGAGCTTCACCGTGGAGAAGGGCATCTACCAG | |
| | ACCAGCAACTTCAGGGTGCAGCCCACCGAGAGCATCGTGAGGTTCC | |
| | CCAACATCACCAACCTGTGCCCCTTCGGCGAGGTGTTCAACGCCAC | |
| | CAGGTTCGCCAGCGTGTACGCCTGGAACAGGAAGAGGATCAGCAAC | |
| | TGCGTGGCCGACTACAGCGTGCTGTACAACAGCGCCAGCTTCAGCA | |
| | CCTTCAAGTGCTACGGCGTGAGCCCCACCAAGCTGAACGACCTGTG | |
| | CTTCACCAACGTGTACGCCGACAGCTTCGTGATCAGGGGCGACGAG | |
| | GTGAGGCAGATCGCCCCCGGCCAGACCGGCAAGATCGCCGACTACA | |
| | ACTACAAGCTGCCCGACGACTTCACCGGCTGCGTGATCGCCTGGAA | |
| | CAGCAACAACCTGGACAGCAAGGTGGGCGGCAACTACAACTACCTG | |
| | TACAGGCTGTTCAGGAAGAGCAACCTGAAGCCCTTCGAGAGGGACA | |
| | TCAGCACCGAGATCTACCAGGCCGGCAGCACCCCCTGCAACGGCGT | |
| | GGAGGGCTTCAACTGCTACTTCCCCCTGCAGAGCTACGGCTTCCAG | |
| | CCCACCAACGGCGTGGGCTACCAGCCCTACAGGGTGGTGGTGCTGA | |
| | GCTTCGAGCTGCTGCACGCCCCCGCCACCGTGTGCGGCCCCAAGAA | |
| | GAGCACCAACCTGGTGAAGAACAAGTGCGTGAACTTCAACTTCAACG | |
| | GCCTGACCGGCACCGGCGTGCTGACCGAGAGCAACAAGAAGTTCCT | |
| | GCCCTTCCAGCAGTTCGGCAGGGACATCGCCGACACCACCGACGCC | |
| | GTGAGGGACCCCCAGACCCTGGAGATCCTGGACATCACCCCCTGCA | |
| | GCTTCGGCGGCGTGAGCGTGATCACCCCCGGCACCAACACCAGCAA | |
| | CCAGGTGGCCGTGCTGTACCAGGACGTGAACTGCACCGAGGTGCCC | |
| | GTGGCCATCCACGCCGACCAGCTGACCCCCACCTGGAGGGTGTACA | |
| | GCACCGGCAGCAACGTGTTCCAGACCAGGGCCGGCTGCCTGATCG | |
| | GCGCCGAGCACGTGAACAACAGCTACGAGTGCGACATCCCCATCGG | |
| | CGCCGGCATCTGCGCCAGCTACCAGACCCAGACCAACAGCCCCAGG | |
| | AGGGCCAGGAGCGTGGCCAGCCAGAGCATCATCGCCTACACCATGA | |
| | GCCTGGGCGCCGAGAACAGCGTGGCCTACAGCAACAACAGCATCGC | |
| | CATCCCCACCAACTTCACCATCAGCGTGACCACCGAGATCCTGCCCG | |
| | TGAGCATGACCAAGACCAGCGTGGACTGCACCATGTACATCTGCGG | |
| | CGACAGCACCGAGTGCAGCAACCTGCTGCTGCAGTACGGCAGCTTC | |
| | TGCACCCAGCTGAACAGGGCCCTGACCGGCATCGCCGTGGAGCAG | |
| | GACAAGAACACCCAGGAGGTGTTCGCCCAGGTGAAGCAGATCTACA | |
| | AGACCCCCCCCATCAAGGACTTCGGCGGCTTCAACTTCAGCCAGATC | |
| | CTGCCCGACCCCAGCAAGCCCAGCAAGAGGAGCTTCATCGAGGACC | |
| | TGCTGTTCAACAAGGTGACCCTGGCCGACGCCGGCTTCATCAAGCA | |
| | GTACGGCGACTGCCTGGGCGACATCGCCGCCAGGGACCTGATCTGC | |
| | GCCCAGAAGTTCAACGGCCTGACCGTGCTGCCCCCCCTGCTGACCG | |
| | ACGAGATGATCGCCCAGTACACCAGCGCCCTGCTGGCCGGCACCAT | |
| | CACCAGCGGCTGGACCTTCGGCGCCGGCGCCGCCCTGCAGATCCC | |
| | CTTCGCCATGCAGATGGCCTACAGGTTCAACGGCATCGGCGTGACC | |
| | CAGAACGTGCTGTACGAGAACCAGAAGCTGATCGCCAACCAGTTCAA | |
| | CAGCGCCATCGGCAAGATCCAGGACAGCCTGAGCAGCACCGCCAGC | |
| | GCCCTGGGCAAGCTGCAGGACGTGGTGAACCAGAACGCCCAGGCC | |
| | CTGAACACCCTGGTGAAGCAGCTGAGCAGCAACTTCGGCGCCATCA | |
| | GCAGCGTGCTGAACGACATCCTGAGCAGGCTGGACCCCCCCGAGG | |
| | CCGAGGTGCAGATCGACAGGCTGATCACCGGCAGGCTGCAGAGCCT | |
| | GCAGACCTACGTGACCCAGCAGCTGATCAGGGCCGCCGAGATCAGG | |
| | GCCAGCGCCAACCTGGCCGCCACCAAGATGAGCGAGTGCGTGCTG | |
| | GGCCAGAGCAAGAGGGTGGACTTCTGCGGCAAGGGCTACCACCTGA | |
| | TGAGCTTCCCCCAGAGCGCCCCCCACGGCGTGGTGTTCCTGCACGT | |
| | GACCTACGTGCCCGCCCAGGAGAAGAACTTCACCACCGCCCCCGCC | |
| | ATCTGCCACGACGGCAAGGCCCACTTCCCCAGGGAGGGCGTGTTCG | |
| | TGAGCAACGGCACCCACTGGTTCGTGACCCAGAGGAACTTCTACGA | |
| | GCCCCAGATCATCACCACCGACAACACCTTCGTGAGCGGCAACTGC | |
| | GACGTGGTGATCGGCATCGTGAACAACACCGTGTACGACCCCCTGC | |
| | AGCCCGAGCTGGACAGCTTCAAGGAGGAGCTGGACAAGTACTTCAA | |
| | GAACCACACCAGCCCCGACGTGGACCTGGGCGACATCAGCGGCATC | |
| | AACGCCAGCGTGGTGAACATCCAGAAGGAGATCGACAGGCTGAACG | |
| | AGGTGGCCAAGAACCTGAACGAGAGCCTGATCGACCTGCAGGAGCT | |
| | GGGCAAGTACGAGCAGTACATCAAGTGGCCCTGGTACATCTGGCTG | |
| | GGCTTCATCGCCGGCCTGATCGCCATCGTGATGGTGACCATCATGCT | |
| | GTGCTGCATGACCAGCTGCTGCAGCTGCCTGAAGGGCTGCTGCAGC | |
| | TGCGGCAGCTGCTGCAAGTTCGACGAGGACGACAGCGAGCCCGTG | |
| | CTGAAGGGCGTGAAGCTGCACTACACCGGAAGCGGAGCCACGAACT | |
| | TCTCTCTGTTAAAGCAAGCAGGAGATGTTGAAGAAAACCCCGGGCCT | |
| | ATGAAGGCAATACTAGTAGTTCTGCTATATACATTTGCAACCGCAAAT | |
| | GCAGACACATTATGTATAGGTTATCATGCGAACAACTCAACAGACACT | |
| | GTAGACACAGTACTAGAAAAGAATGTAACAGTAACACACTCTGTTAAC | |
| | CTTCTAGAAGACAAGCATAACGGGAAACTATGCAAACTAAGAGGGGT | |
| | AGCCCCATTGCATTTGGGTAAATGTAACATTGCTGGCTGGATCCTGG | |
| | GAAATCCAGAGTGTGAATCACTCTCCACAGCAAGCTCATGGTCCTAC | |
| | ATTGTGGAAACATCTAGTTCAGACAATGGAACGTGTTACCCAGGAGA | |
| | TTTCATCGATTATGAGGAGCTAAGAGAGCAATTGAGCTCAGTGTCAT | |
| | CATTTGAAAGGTTTGAGATATTCCCCAAGACAAGTTCATGGCCCAATC | |
| | ATGACTCGAACAAAGGTGTAACGACAGCATGTCCTCATGCTGGAGCA | |
| | AAAAGCTTCTACAAAAATTTAATATGGCTAGTTAAAAAAGGAAATTCAT | |
| | ACCCAAAGCTCAGCAAATCCTACATTAATGATAAAGGGAAAGAAGTC | |
| | CTCGTGCTATGGGGCATTCACCATCCACCTACTAGTGCTGACCAACA | |
| | AAGTCTCTATCAGAATGCAGATGCATATGTTTTTGTGGGGACATCAAG | |
| | ATACAGCAAGAAGTTCAAGCCGGAAATAGCAATAAGGCCCAAAGTGA | |
| | GGGATCAAGAAGGGAGAATGAACTATTACTGGACACTAGTAGAGCCG | |
| | GGAGACAAAATAACATTCGAAGCAACTGGAAATCTAGTGGTACCGAG | |
| | ATATGCATTCGCAATGGAAAGAAATGCTGGATCTGGTATTATCATTTC | |
| | AGATACACCAGTCCACGATTGCAATACAACTTGTCAGACACCCAAGG | |
| | GTGCTATAAACACCAGCCTCCCATTTCAGAACATACATCCGATCACAA | |
| | TTGGAAAATGTCCAAAATATGTAAAAAGCACAAAATTGAGACTGGCCA | |
| | CAGGATTGAGGAATGTCCCGTCCATTCAATCTAGAGGCCTATTTGGG | |
| | GCCATTGCCGGTTTCATTGAAGGGGGGTGGACAGGGATGGTAGATG | |
| | GATGGTACGGTTATCACCATCAAAATGAGCAGGGGTCAGGATATGCA | |
| | GCCGACCTGAAGAGCACACAGAATGCCATTGACGAGATTACTAACAA | |
| | AGTAAACTCTGTTATTGAAAAAATGAATACACAGTTCACAGCAGTAGG | |
| | TAAAGAGTTCAACCACCTGGAAAAAAGAATAGAGAATTTAAATAAAAA | |
| | AGTTGATGATGGTTTCCTGGACATTTGGACTTACAATGCCGAACTGTT | |
| | GGTTCTATTGGAAAATGAAAGAACTTTGGACTACCACGATTCAAAGGT | |
| | GAAGAACTTATATGAAAAGGTAAGAAGCCAGTTAAAAAACAATGCCAA | |
| | GGAAATTGGAAACGGCTGCTTTGAATTTTACCACAAATGTGATAACAC | |
| | GTGCATGGAAAGTGTCAAAAATGGGACTTATGACTACCCAAAATACT | |
| | CAGAGGAAGCAAAATTAAACAGAGAAGAAATAGATGGGGTAAAGCTG | |
| | GAATCAACAAGGATTTACCAGATTTTGGCGATCTATTCAACCGTCGCC | |
| | AGTTCATTGGTACTGGTAGTCTCCCTGGGGGCAATCAGTTTCTGGAT | |
| | GTGCTCTAATGGGTCTCTACAGTGTAGAATATGTATTTAAGGAAGCG | |
| | GAGCCACGAACTTCTCTCTGTTAAAGCAAGCAGGAGATGTTGAAGAA | |
| | AACCCCGGGCCTAGCAAAAGCAGGGGATAATTCTATTAACCATGAAG | |
| | ACTATCATTGCTTTGAGCTACATTCTATGTCTGGTTTTCGCTCAAAAA | |
| | CTTCCTGGAAATGACAATAGCACTGCAACGCTGTGCCTTGGGCACCA | |
| | TGCAGTACCAAACGGAACGATAGTGAAAACAATCACGAATGACCAAA | |
| | TTGAAGTTACTAATGCTACTGAGCTGGTTCAGAATTCCTCAATAGGTG | |
| | AAATATGCGACAGTCCTCATCAGATCCTTGATGGAGAAAACTGCACA | |
| | CTAATAGATGCTCTATTGGGAGACCCTCAGTGTGATGGCTTTCAAAAT | |
| | AAGAAATGGGACCTTTTTGTTGAACGAAGCAAAGCCTACAGCAACTG | |
| | TTACCCTTATGATGTGCCGGATTATGCCTCCCTTAGGTCACTAGTTGC | |
| | CTCATCCGGCACACTGGAGTTTAACAATGAAAGCTTCAATTGGGCTG | |
| | GAGTCACTCAAAACGGAACAAGTTCTGCTTGCATAAGGGGATCTAAT | |
| | AGTAGTTTCTTTAGTAGATTAAATTGGTTGACCCACTTAAACTTCAAGT | |
| | ACCCAGCATTGAACGTGACTATGCCAAACAATGAACAATTTGACAAAT | |
| | TGTACATTTGGGGGGTTCACCACCCGGGTACGGACAAGGACCAAAT | |
| | CTTCCTGTATGCTCAATCATCAGGAAGAATCACAGTATCTACCAAAAG | |
| | AAGCCAACAAGCTGTAATCCCGAATATCGGATCTAGACCCAGAATAA | |
| | GGAATATCCCTAGCAGAATAAGCATCTATTGGACAATAGTAAAACCG | |
| | GGAGACATACTTTTGATTAACAGCACAGGGAATCTAATTGCTCCTAG | |
| | GGGTTACTTCAAAATACGAAGTGGGAAAAGCTCAATAATGAGATCAG | |
| | ATGCACCCATTGGCAAATGCAAGTCTGAATGCATCACTCCAAATGGA | |
| | AGCATTCCCAATGACAAACCATTCCAAAATGTAAACAGGATCACATAC | |
| | GGGGCCTGTCCCAGATATGTTAAGCAAAGCACTCTGAAATTGGCAAC | |
| | AGGAATGCGAAATGTACCAGAGAAACAAACTAGAGGCATATTTGGCG | |
| | CAATAGCGGGTTTCATAGAAAATGGTTGGGAGGGAATGGTGGATGGT | |
| | TGGTACGGTTTCAGGCATCAAAATTCTGAGGGAAGAGGACAAGCAGC | |
| | AGATCTCAAAAGCACTCAAGCAGCAATCGATCAAATCAATGGGAAGC | |
| | TGAATCGATTGATCGGGAAAACCAACGAGAAATTCCATCAGATTGAG | |
| | AAAGAATTCTCAGAAGTAGAAGGGAGAATTCAGGACCTTGAGAAATA | |
| | TGTTGAGGACACAAAAATAGATCTCTGGTCATACAACGCAGAGCTTC | |
| | TTGTTGCCCTGGAAAACCAACATACAATTGATCTAACTGACTCAGAAA | |
| | TGAACAAACTGTTTGAAAAAACAAAGAAGCAACTGAGGGAAAATGCT | |
| | GAGGATATGGGCAATGGTTGTTTCAAAATATACCACAAATGTGACAAT | |
| | GCCTGCATAGGATCAATCAGAAATGGAACTTATGACCACGATGTATA | |
| | CAGGGATGAAGCATTAAACAACCGGTTCCAGATCAAGGGAGTTGAGC | |
| | TGAAGTCAGGGTACAAAGATTGGATCCTATGGATTTCCTTTGCCATAT | |
| | CATGTTTTTTGCTTTGTGTTGCTTTGTTGGGGTTCATCATGTGGGCCT | |
| | GCCAAAAGGGCAACATTAGGTGCAACATTTGCATTTGAGTGCATTAAT | |
| | TAAAAACACCCTTGTTTCTACTGGAAGCGGAGCCACGAACTTCTCTCT | |
| | GTTAAAGCAAGCAGGAGATGTTGAAGAAAACCCCGGGCCTATTTTCT | |
| | AATATCCACAAAATGAAGGCAATAATTGTACTACTCATGGTAGTAACA | |
| | TCCAATGCAGATCGAATCTGCACTGGGATAACATCGTCAAACTCACC | |
| | ACATGTCGTCAAAACTGCTACTCAAGGGGAGGTCAACGTGACCGGT | |
| | GTAATACCACTGACAACAACACCCACCAAATCTCATTTTGCAAATCTC | |
| | AAAGGAACAGAAACCAGGGGGAAACTATGCCCAAAATGCCTCAACTG | |
| | CACAGATCTGGATGTAGCCTTGGGCAGACCAAAATGCACAGGGAAAA | |
| | TACCCTCTGCAAGGGTTTCAATACTCCATGAAGTCAGACCTGTTACAT | |
| | CTGGGTGCTTTCCTATAATGCACGATAGAACAAAAATTAGACAGCTG | |
| | CCTAACCTTCTCCGAGGATACGAACATGTCAGGTTATCAACTCACAA | |
| | CGTTATCAATGCAAAAGATGCACCAGGAAGACCCTACGAAATTGGAA | |
| | CCTCAGGGTCTTGCCCTAACATTACCAATGGAAACGGATTCTTCGCA | |
| | ACAATGGCTTGGGCCGTCCCAAAAAACAAAACAGCAACAAATCCATT | |
| | AACAATAGAAGTACCATACATTTGTACAGAAGGAGAAGACCAAATTAC | |
| | CGTTTGGGGGTTCCACTCTGACAACGAGACCCAAATGGCAAAGCTCT | |
| | ATGGGGACTCAAAGCCCCAGAAGTTCACCTCATCTGCCAACGGAGT | |
| | GACCACACATTACGTTTCACAGATTGGTGGCTTCCCAAATCAAACAG | |
| | AAGACGGAGGACTACCACAAAGTGGCAGAATTGTTGTTGATTACATG | |
| | GTGCAGAAATCTGGAAAAACAGGAACAATTACCTATCAAAGAGGTATT | |
| | TTATTGCCTCAAAAAGTGTGGTGCGCAAGTGGCAGGAGCAAGGTAAT | |
| | AAAAGGATCCTTGCCCTTAATTGGAGAAGCAGATTGCCTCCATGAAA | |
| | AATACGGTGGATTAAACAAAAGCAAGCCTTACTACACAGGGGAACAT | |
| | GCAAAGGCCATAGGAAATTGCCCAATATGGGTGAAAACACCCTTGAA | |
| | GCTGGCCAATGGAACCAAATATAGACCCCCTGCAAAACTATTAAAGG | |
| | AAAGAGGTTTCTTCGGAGCCATTGCTGGTTTCTTAGAGGGAGGATGG | |
| | GAAGGAATGATTGCAGGTTGGCACGGATACACATCCCATGGGGCAC | |
| | ATGGAGTAGCGGTGGCAGCTGACCTTAAGAGCACTCAAGAGGCCAT | |
| | AAACAAGATAACAAAAAATCTCAACTCTTTGAGTGAGCTGGAAGTAAA | |
| | GAATCTTCAAAGACTAAGCGGTGCCATGGATGAACTCCACAACGAAA | |
| | TACTAGAACTAGATGAGAAAGTGGATGATCTCAGAGCTGACACAATA | |
| | AGCTCACAAATAGAACTCGCAGTCCTGCTTTCCAATGAAGGAATAATA | |
| | AACAGTGAAGATGAACATCTCTTGGCGCTTGAAAGAAAGCTGAAGAA | |
| | AATGCTGGGCCCCTCTGCTGTAGAGATAGGGAATGGATGCTTTGAAA | |
| | CCAAACACAAGTGCAACCAGACCTGCCTCGACAGAATAGCTGCTGGT | |
| | ACCTTTGATGCAGGAGAATTTTCTCTCCCCACCTTTGATTCACTGAAT | |
| | ATTACTGCTGCATCTTTAAATGACGACGGATTGGACAATCATACTATA | |
| | CTGCTTTACTACTCAACTGCTGCCTCCAGTTTGGCTGTAACACTGATG | |
| | ATAGCTATCTTTGTTGTTTATATGGTCTCCAGAGACAATGTTTCTTGCT | |
| | CCATTTGTCTATAAGGAAAGTTAAGCCCTGTATTTTCCTTTATTGTAGT | |
| | GCTTGTTTGCTTGTTGTCATTACAAAGAAACGTTATTGAAAAATGGAA | |
| | GCGGAGCCACGAACTTCTCTCTGTTAAAGCAAGCAGGAGATGTTGAA | |
| | GAAAACCCCGGGCCTTTCGGAGCTATTGCTGGTTTCTTGGAAGGAG | |
| | GATGGGAAGGAATGATTGCAGGTTGGCACGGATACACATCTCATGGA | |
| | GCACATGGAGTAGCAGTGGCAGCAGACCTTAAGAGTACCCATGATG | |
| | ACTCGAGCTGGTACTGCATGCACGCAATGCTAGCTGCCCCTTTCCCG | |
| | TCCTGGGTACCCCGAGTCTCCCCCGACCTCGGGTCCCAGGTATGCT | |
| | CCCACCTCCACCTGCCCCACTCACCACCTCTGCTAGTTCCAGACACC | |
| | TCCCAAGCACGCAGCAATGCAGCTCAAAACGCTTAGCCTAGCCACAC | |
| | CCCCACGGGAAACAGCAGTGATTAACCTTTAGCAATAAACGAAAGTT | |
| | TAACTAAGCTATACTAACCCCAGGGTTGGTCAATTTCGTGCCAGCCA | |
| | CACCCTGGAGCTAGCAAAAAAAA | |
| Pan-CoV-Flu | CTCGACATTGATTATTGACTAGTTATTAATAGTAATCAATTACGGGGT | 401 |
| Vaccine #13 | CATTAGTTCATAGCCCATATATGGAGTTCCGCGTTACATAACTTACGG | |
| CoV-Wuhan | TAAATGGCCCGCCTGGCTGACCGCCCAACGACCCCCGCCCATTGAC | |
| Spike(HexaPro)- | GTCAATAATGACGTATGTTCCCATAGTAACGCCAATAGGGACTTTCCA | |
| Influenza (HA) | TTGACGTCAATGGGTGGAGTATTTACGGTAAACTGCCCACTTGGCAG | |
| | TACATCAAGTGTATCATATGCCAAGTACGCCCCCTATTGACGTCAATG | |
| | ACGGTAAATGGCCCGCCTGGCATTATGCCCAGTACATGACCTTATGG | |
| | GACTTTCCTACTTGGCAGTACATCTACGTATTAGTCATCGCTATTACC | |
| | ATGGTCGAGGTGAGCCCCACGTTCTGCTTCACTCTCCCCATCTCCCC | |
| | CCCCTCCCCACCCCCAATTTTGTATTTATTTATTTTTTAATTATTTTGT | |
| | GCAGCGATGGGGGCGGGGGGGGGGGGGGGGCGCGCGCCAGGCG | |
| | GGGCGGGGCGGGGCGAGGGGCGGGGCGGGGCGAGGCGGAGAGG | |
| | TGCGGCGGCAGCCAATCAGAGCGGCGCGCTCCGAAAGTTTCCTTTT | |
| | ATGGCGAGGCGGCGGCGGCGGCGGCCCTATAAAAAGCGAAGCGCG | |
| | CGGCGGGCGGGAGTCGCTGCGCGCTGCCTTCGCCCCGTGCCCCGC | |
| | TCCGCCGCCGCCTCGCGCCGCCCGCCCCGGCTCTGACTGACCGCG | |
| | TTACTCCCACAGGTGAGCGGGCGGGACGGCCCTTCTCCTCCGGGCT | |
| | GTAATTAGCGCTTGGTTTAATGACGGCTTGTTTCTTTTCTGTGGCTGC | |
| | GTGAAAGCCTTGAGGGGCTCCGGGAGGGCCCTTTGTGCGGGGGGA | |
| | GCGGCTCGGGGGGTGCGTGCGTGTGTGTGTGCGTGGGGAGCGCCG | |
| | CGTGCGGCTCCGCGCTGCCCGGCGGCTGTGAGCGCTGCGGGCGCG | |
| | GCGCGGGGCTTTGTGCGCTCCGCAGTGTGCGCGAGGGGAGCGCGG | |
| | CCGGGGGCGGTGCCCCGCGGTGCGGGGGGGGCTGCGAGGGGAAC | |
| | AAAGGCTGCGTGCGGGGTGTGTGCGTGGGGGGGTGAGCAGGGGGT | |
| | GTGGGCGCGTCGGTCGGGCTGCAACCCCCCCTGCACCCCCCTCCC | |
| | CGAGTTGCTGAGCACGGCCCGGCTTCGGGTGCGGGGCTCCGTACG | |
| | GGGCGTGGCGCGGGGCTCGCCGTGCCGGGCGGGGGGTGGCGGCA | |
| | GGTGGGGGTGCCGGGCGGGGCGGGGCCGCCTCGGGCCGGGGAG | |
| | GGCTCGGGGGAGGGGCGCGGCGGCCCCCGGAGCGCCGGCGGCTG | |
| | TCGAGGCGCGGCGAGCCGCAGCCATTGCCTTTTATGGTAATCGTGC | |
| | GAGAGGGCGCAGGGACTTCCTTTGTCCCAAATCTGTGCGGAGCCGA | |
| | AATCTGGGAGGCGCCGCCGCACCCCCTCTAGCGGGCGCGGGGCGA | |
| | AGCGGTGCGGCGCCGGCAGGAAGGAAATGGGCGGGGAGGGCCTTC | |
| | GTGCGTCGCCGCGCCGCCGTCCCCTTCTCCCTCTCCAGCCTCGGGG | |
| | CTGTCCGCGGGGGGACGGCTGCCTTCGGGGGGGACGGGGCAGGG | |
| | CGGGGTTCGGCTTCTGGCGTGTGACCGGCGGCTCTAGAGCCTCTGC | |
| | TAACCATGTTCATGCCTTCTTCTTTTTCCTACAGCTCCTGGGCAACGT | |
| | GCTGGTTATTGTGCTGTCTCATCATTTTGGCAAAGAATTGGAGAATAA | |
| | ACTAGTATTCTTCTGGTCCCCACAGACTCAGAGAGAACCCGCCACCA | |
| | TGTTCGTGTTCCTGGTGCTGCTGCCCCTGGTGAGCAGCCAGTGCGT | |
| | GAACCTGACCACCAGGACCCAGCTGCCCCCCGCCTACACCAACAGC | |
| | TTCACCAGGGGCGTGTACTACCCCGACAAGGTGTTCAGGAGCAGCG | |
| | TGCTGCACAGCACCCAGGACCTGTTCCTGCCCTTCTTCAGCAACGTG | |
| | ACCTGGTTCCACGCCATCCACGTGAGCGGCACCAACGGCACCAAGA | |
| | GGTTCGACAACCCCGTGCTGCCCTTCAACGACGGCGTGTACTTCGC | |
| | CAGCACCGAGAAGAGCAACATCATCAGGGGCTGGATCTTCGGCACC | |
| | ACCCTGGACAGCAAGACCCAGAGCCTGCTGATCGTGAACAACGCCA | |
| | CCAACGTGGTGATCAAGGTGTGCGAGTTCCAGTTCTGCAACGACCC | |
| | CTTCCTGGGCGTGTACTACCACAAGAACAACAAGAGCTGGATGGAGA | |
| | GCGAGTTCAGGGTGTACAGCAGCGCCAACAACTGCACCTTCGAGTA | |
| | CGTGAGCCAGCCCTTCCTGATGGACCTGGAGGGCAAGCAGGGCAAC | |
| | TTCAAGAACCTGAGGGAGTTCGTGTTCAAGAACATCGACGGCTACTT | |
| | CAAGATCTACAGCAAGCACACCCCCATCAACCTGGTGAGGGACCTG | |
| | CCCCAGGGCTTCAGCGCCCTGGAGCCCCTGGTGGACCTGCCCATCG | |
| | GCATCAACATCACCAGGTTCCAGACCCTGCTGGCCCTGCACAGGAG | |
| | CTACCTGACCCCCGGCGACAGCAGCAGCGGCTGGACCGCCGGCGC | |
| | CGCCGCCTACTACGTGGGCTACCTGCAGCCCAGGACCTTCCTGCTG | |
| | AAGTACAACGAGAACGGCACCATCACCGACGCCGTGGACTGCGCCC | |
| | TGGACCCCCTGAGCGAGACCAAGTGCACCCTGAAGAGCTTCACCGT | |
| | GGAGAAGGGCATCTACCAGACCAGCAACTTCAGGGTGCAGCCCACC | |
| | GAGAGCATCGTGAGGTTCCCCAACATCACCAACCTGTGCCCCTTCG | |
| | GCGAGGTGTTCAACGCCACCAGGTTCGCCAGCGTGTACGCCTGGAA | |
| | CAGGAAGAGGATCAGCAACTGCGTGGCCGACTACAGCGTGCTGTAC | |
| | AACAGCGCCAGCTTCAGCACCTTCAAGTGCTACGGCGTGAGCCCCA | |
| | CCAAGCTGAACGACCTGTGCTTCACCAACGTGTACGCCGACAGCTTC | |
| | GTGATCAGGGGCGACGAGGTGAGGCAGATCGCCCCCGGCCAGACC | |
| | GGCAAGATCGCCGACTACAACTACAAGCTGCCCGACGACTTCACCG | |
| | GCTGCGTGATCGCCTGGAACAGCAACAACCTGGACAGCAAGGTGGG | |
| | CGGCAACTACAACTACCTGTACAGGCTGTTCAGGAAGAGCAACCTGA | |
| | AGCCCTTCGAGAGGGACATCAGCACCGAGATCTACCAGGCCGGCAG | |
| | CACCCCCTGCAACGGCGTGGAGGGCTTCAACTGCTACTTCCCCCTG | |
| | CAGAGCTACGGCTTCCAGCCCACCAACGGCGTGGGCTACCAGCCCT | |
| | ACAGGGTGGTGGTGCTGAGCTTCGAGCTGCTGCACGCCCCCGCCAC | |
| | CGTGTGCGGCCCCAAGAAGAGCACCAACCTGGTGAAGAACAAGTGC | |
| | GTGAACTTCAACTTCAACGGCCTGACCGGCACCGGCGTGCTGACCG | |
| | AGAGCAACAAGAAGTTCCTGCCCTTCCAGCAGTTCGGCAGGGACAT | |
| | CGCCGACACCACCGACGCCGTGAGGGACCCCCAGACCCTGGAGAT | |
| | CCTGGACATCACCCCCTGCAGCTTCGGCGGCGTGAGCGTGATCACC | |
| | CCCGGCACCAACACCAGCAACCAGGTGGCCGTGCTGTACCAGGACG | |
| | TGAACTGCACCGAGGTGCCCGTGGCCATCCACGCCGACCAGCTGAC | |
| | CCCCACCTGGAGGGTGTACAGCACCGGCAGCAACGTGTTCCAGACC | |
| | AGGGCCGGCTGCCTGATCGGCGCCGAGCACGTGAACAACAGCTAC | |
| | GAGTGCGACATCCCCATCGGCGCCGGCATCTGCGCCAGCTACCAGA | |
| | CCCAGACCAACAGCCCCGGCAGCGCCAGCAGCGTGGCCAGCCAGA | |
| | GCATCATCGCCTACACCATGAGCCTGGGCGCCGAGAACAGCGTGGC | |
| | CTACAGCAACAACAGCATCGCCATCCCCACCAACTTCACCATCAGCG | |
| | TGACCACCGAGATCCTGCCCGTGAGCATGACCAAGACCAGCGTGGA | |
| | CTGCACCATGTACATCTGCGGCGACAGCACCGAGTGCAGCAACCTG | |
| | CTGCTGCAGTACGGCAGCTTCTGCACCCAGCTGAACAGGGCCCTGA | |
| | CCGGCATCGCCGTGGAGCAGGACAAGAACACCCAGGAGGTGTTCGC | |
| | CCAGGTGAAGCAGATCTACAAGACCCCCCCCATCAAGGACTTCGGC | |
| | GGCTTCAACTTCAGCCAGATCCTGCCCGACCCCAGCAAGCCCAGCA | |
| | AGAGGAGCCCCATCGAGGACCTGCTGTTCAACAAGGTGACCCTGGC | |
| | CGACGCCGGCTTCATCAAGCAGTACGGCGACTGCCTGGGCGACATC | |
| | GCCGCCAGGGACCTGATCTGCGCCCAGAAGTTCAACGGCCTGACCG | |
| | TGCTGCCCCCCCTGCTGACCGACGAGATGATCGCCCAGTACACCAG | |
| | CGCCCTGCTGGCCGGCACCATCACCAGCGGCTGGACCTTCGGCGC | |
| | CGGCCCCGCCCTGCAGATCCCCTTCCCCATGCAGATGGCCTACAGG | |
| | TTCAACGGCATCGGCGTGACCCAGAACGTGCTGTACGAGAACCAGA | |
| | AGCTGATCGCCAACCAGTTCAACAGCGCCATCGGCAAGATCCAGGA | |
| | CAGCCTGAGCAGCACCCCCAGCGCCCTGGGCAAGCTGCAGGACGT | |
| | GGTGAACCAGAACGCCCAGGCCCTGAACACCCTGGTGAAGCAGCTG | |
| | AGCAGCAACTTCGGCGCCATCAGCAGCGTGCTGAACGACATCCTGA | |
| | GCAGGCTGGACCCCCCCGAGGCCGAGGTGCAGATCGACAGGCTGA | |
| | TCACCGGCAGGCTGCAGAGCCTGCAGACCTACGTGACCCAGCAGCT | |
| | GATCAGGGCCGCCGAGATCAGGGCCAGCGCCAACCTGGCCGCCAC | |
| | CAAGATGAGCGAGTGCGTGCTGGGCCAGAGCAAGAGGGTGGACTTC | |
| | TGCGGCAAGGGCTACCACCTGATGAGCTTCCCCCAGAGCGCCCCCC | |
| | ACGGCGTGGTGTTCCTGCACGTGACCTACGTGCCCGCCCAGGAGAA | |
| | GAACTTCACCACCGCCCCCGCCATCTGCCACGACGGCAAGGCCCAC | |
| | TTCCCCAGGGAGGGCGTGTTCGTGAGCAACGGCACCCACTGGTTCG | |
| | TGACCCAGAGGAACTTCTACGAGCCCCAGATCATCACCACCGACAAC | |
| | ACCTTCGTGAGCGGCAACTGCGACGTGGTGATCGGCATCGTGAACA | |
| | ACACCGTGTACGACCCCCTGCAGCCCGAGCTGGACAGCTTCAAGGA | |
| | GGAGCTGGACAAGTACTTCAAGAACCACACCAGCCCCGACGTGGAC | |
| | CTGGGCGACATCAGCGGCATCAACGCCAGCGTGGTGAACATCCAGA | |
| | AGGAGATCGACAGGCTGAACGAGGTGGCCAAGAACCTGAACGAGAG | |
| | CCTGATCGACCTGCAGGAGCTGGGCAAGTACGAGCAGTACATCAAG | |
| | TGGCCCTGGTACATCTGGCTGGGCTTCATCGCCGGCCTGATCGCCA | |
| | TCGTGATGGTGACCATCATGCTGTGCTGCATGACCAGCTGCTGCAGC | |
| | TGCCTGAAGGGCTGCTGCAGCTGCGGCAGCTGCTGCAAGTTCGACG | |
| | AGGACGACAGCGAGCCCGTGCTGAAGGGCGTGAAGCTGCACTACAC | |
| | CGGAAGCGGAGCCACGAACTTCTCTCTGTTAAAGCAAGCAGGAGAT | |
| | GTTGAAGAAAACCCCGGGCCTATGAAGGCAATACTAGTAGTTCTGCT | |
| | ATATACATTTGCAACCGCAAATGCAGACACATTATGTATAGGTTATCA | |
| | TGCGAACAACTCAACAGACACTGTAGACACAGTACTAGAAAAGAATG | |
| | TAACAGTAACACACTCTGTTAACCTTCTAGAAGACAAGCATAACGGGA | |
| | AACTATGCAAACTAAGAGGGGTAGCCCCATTGCATTTGGGTAAATGT | |
| | AACATTGCTGGCTGGATCCTGGGAAATCCAGAGTGTGAATCACTCTC | |
| | CACAGCAAGCTCATGGTCCTACATTGTGGAAACATCTAGTTCAGACA | |
| | ATGGAACGTGTTACCCAGGAGATTTCATCGATTATGAGGAGCTAAGA | |
| | GAGCAATTGAGCTCAGTGTCATCATTTGAAAGGTTTGAGATATTCCCC | |
| | AAGACAAGTTCATGGCCCAATCATGACTCGAACAAAGGTGTAACGAC | |
| | AGCATGTCCTCATGCTGGAGCAAAAAGCTTCTACAAAAATTTAATATG | |
| | GCTAGTTAAAAAAGGAAATTCATACCCAAAGCTCAGCAAATCCTACAT | |
| | TAATGATAAAGGGAAAGAAGTCCTCGTGCTATGGGGCATTCACCATC | |
| | CACCTACTAGTGCTGACCAACAAAGTCTCTATCAGAATGCAGATGCA | |
| | TATGTTTTTGTGGGGACATCAAGATACAGCAAGAAGTTCAAGCCGGA | |
| | AATAGCAATAAGGCCCAAAGTGAGGGATCAAGAAGGGAGAATGAACT | |
| | ATTACTGGACACTAGTAGAGCCGGGAGACAAAATAACATTCGAAGCA | |
| | ACTGGAAATCTAGTGGTACCGAGATATGCATTCGCAATGGAAAGAAA | |
| | TGCTGGATCTGGTATTATCATTTCAGATACACCAGTCCACGATTGCAA | |
| | TACAACTTGTCAGACACCCAAGGGTGCTATAAACACCAGCCTCCCAT | |
| | TTCAGAACATACATCCGATCACAATTGGAAAATGTCCAAAATATGTAA | |
| | AAAGCACAAAATTGAGACTGGCCACAGGATTGAGGAATGTCCCGTCC | |
| | ATTCAATCTAGAGGCCTATTTGGGGCCATTGCCGGTTTCATTGAAGG | |
| | GGGGTGGACAGGGATGGTAGATGGATGGTACGGTTATCACCATCAA | |
| | AATGAGCAGGGGTCAGGATATGCAGCCGACCTGAAGAGCACACAGA | |
| | ATGCCATTGACGAGATTACTAACAAAGTAAACTCTGTTATTGAAAAAA | |
| | TGAATACACAGTTCACAGCAGTAGGTAAAGAGTTCAACCACCTGGAA | |
| | AAAAGAATAGAGAATTTAAATAAAAAAGTTGATGATGGTTTCCTGGAC | |
| | ATTTGGACTTACAATGCCGAACTGTTGGTTCTATTGGAAAATGAAAGA | |
| | ACTTTGGACTACCACGATTCAAAGGTGAAGAACTTATATGAAAAGGTA | |
| | AGAAGCCAGTTAAAAAACAATGCCAAGGAAATTGGAAACGGCTGCTT | |
| | TGAATTTTACCACAAATGTGATAACACGTGCATGGAAAGTGTCAAAAA | |
| | TGGGACTTATGACTACCCAAAATACTCAGAGGAAGCAAAATTAAACA | |
| | GAGAAGAAATAGATGGGGTAAAGCTGGAATCAACAAGGATTTACCAG | |
| | ATTTTGGCGATCTATTCAACCGTCGCCAGTTCATTGGTACTGGTAGTC | |
| | TCCCTGGGGGCAATCAGTTTCTGGATGTGCTCTAATGGGTCTCTACA | |
| | GTGTAGAATATGTATTTAAGGAAGCGGAGCCACGAACTTCTCTCTGTT | |
| | AAAGCAAGCAGGAGATGTTGAAGAAAACCCCGGGCCTAGCAAAAGC | |
| | AGGGGATAATTCTATTAACCATGAAGACTATCATTGCTTTGAGCTACA | |
| | TTCTATGTCTGGTTTTCGCTCAAAAACTTCCTGGAAATGACAATAGCA | |
| | CTGCAACGCTGTGCCTTGGGCACCATGCAGTACCAAACGGAACGAT | |
| | AGTGAAAACAATCACGAATGACCAAATTGAAGTTACTAATGCTACTGA | |
| | GCTGGTTCAGAATTCCTCAATAGGTGAAATATGCGACAGTCCTCATC | |
| | AGATCCTTGATGGAGAAAACTGCACACTAATAGATGCTCTATTGGGA | |
| | GACCCTCAGTGTGATGGCTTTCAAAATAAGAAATGGGACCTTTTTGTT | |
| | GAACGAAGCAAAGCCTACAGCAACTGTTACCCTTATGATGTGCCGGA | |
| | TTATGCCTCCCTTAGGTCACTAGTTGCCTCATCCGGCACACTGGAGT | |
| | TTAACAATGAAAGCTTCAATTGGGCTGGAGTCACTCAAAACGGAACA | |
| | AGTTCTGCTTGCATAAGGGGATCTAATAGTAGTTTCTTTAGTAGATTA | |
| | AATTGGTTGACCCACTTAAACTTCAAGTACCCAGCATTGAACGTGACT | |
| | ATGCCAAACAATGAACAATTTGACAAATTGTACATTTGGGGGGTTCAC | |
| | CACCCGGGTACGGACAAGGACCAAATCTTCCTGTATGCTCAATCATC | |
| | AGGAAGAATCACAGTATCTACCAAAAGAAGCCAACAAGCTGTAATCC | |
| | CGAATATCGGATCTAGACCCAGAATAAGGAATATCCCTAGCAGAATA | |
| | AGCATCTATTGGACAATAGTAAAACCGGGAGACATACTTTTGATTAAC | |
| | AGCACAGGGAATCTAATTGCTCCTAGGGGTTACTTCAAAATACGAAG | |
| | TGGGAAAAGCTCAATAATGAGATCAGATGCACCCATTGGCAAATGCA | |
| | AGTCTGAATGCATCACTCCAAATGGAAGCATTCCCAATGACAAACCAT | |
| | TCCAAAATGTAAACAGGATCACATACGGGGCCTGTCCCAGATATGTT | |
| | AAGCAAAGCACTCTGAAATTGGCAACAGGAATGCGAAATGTACCAGA | |
| | GAAACAAACTAGAGGCATATTTGGCGCAATAGCGGGTTTCATAGAAA | |
| | ATGGTTGGGAGGGAATGGTGGATGGTTGGTACGGTTTCAGGCATCA | |
| | AAATTCTGAGGGAAGAGGACAAGCAGCAGATCTCAAAAGCACTCAAG | |
| | CAGCAATCGATCAAATCAATGGGAAGCTGAATCGATTGATCGGGAAA | |
| | ACCAACGAGAAATTCCATCAGATTGAGAAAGAATTCTCAGAAGTAGAA | |
| | GGGAGAATTCAGGACCTTGAGAAATATGTTGAGGACACAAAAATAGA | |
| | TCTCTGGTCATACAACGCAGAGCTTCTTGTTGCCCTGGAAAACCAAC | |
| | ATACAATTGATCTAACTGACTCAGAAATGAACAAACTGTTTGAAAAAA | |
| | CAAAGAAGCAACTGAGGGAAAATGCTGAGGATATGGGCAATGGTTGT | |
| | TTCAAAATATACCACAAATGTGACAATGCCTGCATAGGATCAATCAGA | |
| | AATGGAACTTATGACCACGATGTATACAGGGATGAAGCATTAAACAA | |
| | CCGGTTCCAGATCAAGGGAGTTGAGCTGAAGTCAGGGTACAAAGATT | |
| | GGATCCTATGGATTTCCTTTGCCATATCATGTTTTTTGCTTTGTGTTGC | |
| | TTTGTTGGGGTTCATCATGTGGGCCTGCCAAAAGGGCAACATTAGGT | |
| | GCAACATTTGCATTTGAGTGCATTAATTAAAAACACCCTTGTTTCTACT | |
| | GGAAGCGGAGCCACGAACTTCTCTCTGTTAAAGCAAGCAGGAGATGT | |
| | TGAAGAAAACCCCGGGCCTATTTTCTAATATCCACAAAATGAAGGCAA | |
| | TAATTGTACTACTCATGGTAGTAACATCCAATGCAGATCGAATCTGCA | |
| | CTGGGATAACATCGTCAAACTCACCACATGTCGTCAAAACTGCTACT | |
| | CAAGGGGAGGTCAACGTGACCGGTGTAATACCACTGACAACAACAC | |
| | CCACCAAATCTCATTTTGCAAATCTCAAAGGAACAGAAACCAGGGGG | |
| | AAACTATGCCCAAAATGCCTCAACTGCACAGATCTGGATGTAGCCTT | |
| | GGGCAGACCAAAATGCACAGGGAAAATACCCTCTGCAAGGGTTTCAA | |
| | TACTCCATGAAGTCAGACCTGTTACATCTGGGTGCTTTCCTATAATGC | |
| | ACGATAGAACAAAAATTAGACAGCTGCCTAACCTTCTCCGAGGATAC | |
| | GAACATGTCAGGTTATCAACTCACAACGTTATCAATGCAAAAGATGCA | |
| | CCAGGAAGACCCTACGAAATTGGAACCTCAGGGTCTTGCCCTAACAT | |
| | TACCAATGGAAACGGATTCTTCGCAACAATGGCTTGGGCCGTCCCAA | |
| | AAAACAAAACAGCAACAAATCCATTAACAATAGAAGTACCATACATTT | |
| | GTACAGAAGGAGAAGACCAAATTACCGTTTGGGGGTTCCACTCTGAC | |
| | AACGAGACCCAAATGGCAAAGCTCTATGGGGACTCAAAGCCCCAGA | |
| | AGTTCACCTCATCTGCCAACGGAGTGACCACACATTACGTTTCACAG | |
| | ATTGGTGGCTTCCCAAATCAAACAGAAGACGGAGGACTACCACAAAG | |
| | TGGCAGAATTGTTGTTGATTACATGGTGCAGAAATCTGGAAAAACAG | |
| | GAACAATTACCTATCAAAGAGGTATTTTATTGCCTCAAAAAGTGTGGT | |
| | GCGCAAGTGGCAGGAGCAAGGTAATAAAAGGATCCTTGCCCTTAATT | |
| | GGAGAAGCAGATTGCCTCCATGAAAAATACGGTGGATTAAACAAAAG | |
| | CAAGCCTTACTACACAGGGGAACATGCAAAGGCCATAGGAAATTGCC | |
| | CAATATGGGTGAAAACACCCTTGAAGCTGGCCAATGGAACCAAATAT | |
| | AGACCCCCTGCAAAACTATTAAAGGAAAGAGGTTTCTTCGGAGCCAT | |
| | TGCTGGTTTCTTAGAGGGAGGATGGGAAGGAATGATTGCAGGTTGG | |
| | CACGGATACACATCCCATGGGGCACATGGAGTAGCGGTGGCAGCTG | |
| | ACCTTAAGAGCACTCAAGAGGCCATAAACAAGATAACAAAAAATCTCA | |
| | ACTCTTTGAGTGAGCTGGAAGTAAAGAATCTTCAAAGACTAAGCGGT | |
| | GCCATGGATGAACTCCACAACGAAATACTAGAACTAGATGAGAAAGT | |
| | GGATGATCTCAGAGCTGACACAATAAGCTCACAAATAGAACTCGCAG | |
| | TCCTGCTTTCCAATGAAGGAATAATAAACAGTGAAGATGAACATCTCT | |
| | TGGCGCTTGAAAGAAAGCTGAAGAAAATGCTGGGCCCCTCTGCTGTA | |
| | GAGATAGGGAATGGATGCTTTGAAACCAAACACAAGTGCAACCAGAC | |
| | CTGCCTCGACAGAATAGCTGCTGGTACCTTTGATGCAGGAGAATTTT | |
| | CTCTCCCCACCTTTGATTCACTGAATATTACTGCTGCATCTTTAAATG | |
| | ACGACGGATTGGACAATCATACTATACTGCTTTACTACTCAACTGCTG | |
| | CCTCCAGTTTGGCTGTAACACTGATGATAGCTATCTTTGTTGTTTATA | |
| | TGGTCTCCAGAGACAATGTTTCTTGCTCCATTTGTCTATAAGGAAAGT | |
| | TAAGCCCTGTATTTTCCTTTATTGTAGTGCTTGTTTGCTTGTTGTCATT | |
| | ACAAAGAAACGTTATTGAAAAATGGAAGCGGAGCCACGAACTTCTCT | |
| | CTGTTAAAGCAAGCAGGAGATGTTGAAGAAAACCCCGGGCCTTTCGG | |
| | AGCTATTGCTGGTTTCTTGGAAGGAGGATGGGAAGGAATGATTGCAG | |
| | GTTGGCACGGATACACATCTCATGGAGCACATGGAGTAGCAGTGGC | |
| | AGCAGACCTTAAGAGTACCCATGATGACTCGAGCTGGTACTGCATGC | |
| | ACGCAATGCTAGCTGCCCCTTTCCCGTCCTGGGTACCCCGAGTCTCC | |
| | CCCGACCTCGGGTCCCAGGTATGCTCCCACCTCCACCTGCCCCACT | |
| | CACCACCTCTGCTAGTTCCAGACACCTCCCAAGCACGCAGCAATGCA | |
| | GCTCAAAACGCTTAGCCTAGCCACACCCCCACGGGAAACAGCAGTG | |
| | ATTAACCTTTAGCAATAAACGAAAGTTTAACTAAGCTATACTAACCCC | |
| | AGGGTTGGTCAATTTCGTGCCAGCCACACCCTGGAGCTAGCAAAAAA | |
| | AA | |
| Pan-CoV-Flu | CTCGACATTGATTATTGACTAGTTATTAATAGTAATCAATTACGGGGT | 402 |
| Vaccine #14 | CATTAGTTCATAGCCCATATATGGAGTTCCGCGTTACATAACTTACGG | |
| CoV-Wuhan | TAAATGGCCCGCCTGGCTGACCGCCCAACGACCCCCGCCCATTGAC | |
| Spike(2 proline | GTCAATAATGACGTATGTTCCCATAGTAACGCCAATAGGGACTTTCCA | |
| substitution)- | TTGACGTCAATGGGTGGAGTATTTACGGTAAACTGCCCACTTGGCAG | |
| influenza (HA) | TACATCAAGTGTATCATATGCCAAGTACGCCCCCTATTGACGTCAATG | |
| | ACGGTAAATGGCCCGCCTGGCATTATGCCCAGTACATGACCTTATGG | |
| | GACTTTCCTACTTGGCAGTACATCTACGTATTAGTCATCGCTATTACC | |
| | ATGGTCGAGGTGAGCCCCACGTTCTGCTTCACTCTCCCCATCTCCCC | |
| | CCCCTCCCCACCCCCAATTTTGTATTTATTTATTTTTTAATTATTTTGT | |
| | GCAGCGATGGGGGCGGGGGGGGGGGGGGGGCGCGCGCCAGGCG | |
| | GGGCGGGGCGGGGCGAGGGGCGGGGCGGGGCGAGGCGGAGAGG | |
| | TGCGGCGGCAGCCAATCAGAGCGGCGCGCTCCGAAAGTTTCCTTTT | |
| | ATGGCGAGGCGGCGGCGGCGGCGGCCCTATAAAAAGCGAAGCGCG | |
| | CGGCGGGCGGGAGTCGCTGCGCGCTGCCTTCGCCCCGTGCCCCGC | |
| | TCCGCCGCCGCCTCGCGCCGCCCGCCCCGGCTCTGACTGACCGCG | |
| | TTACTCCCACAGGTGAGCGGGCGGGACGGCCCTTCTCCTCCGGGCT | |
| | GTAATTAGCGCTTGGTTTAATGACGGCTTGTTTCTTTTCTGTGGCTGC | |
| | GTGAAAGCCTTGAGGGGCTCCGGGAGGGCCCTTTGTGCGGGGGGA | |
| | GCGGCTCGGGGGGTGCGTGCGTGTGTGTGTGCGTGGGGAGCGCCG | |
| | CGTGCGGCTCCGCGCTGCCCGGCGGCTGTGAGCGCTGCGGGCGCG | |
| | GCGCGGGGCTTTGTGCGCTCCGCAGTGTGCGCGAGGGGAGCGCGG | |
| | CCGGGGGCGGTGCCCCGCGGTGCGGGGGGGGCTGCGAGGGGAAC | |
| | AAAGGCTGCGTGCGGGGTGTGTGCGTGGGGGGGTGAGCAGGGGGT | |
| | GTGGGCGCGTCGGTCGGGCTGCAACCCCCCCTGCACCCCCCTCCC | |
| | CGAGTTGCTGAGCACGGCCCGGCTTCGGGTGCGGGGCTCCGTACG | |
| | GGGCGTGGCGCGGGGCTCGCCGTGCCGGGCGGGGGGTGGCGGCA | |
| | GGTGGGGGTGCCGGGCGGGGCGGGGCCGCCTCGGGCCGGGGAG | |
| | GGCTCGGGGGAGGGGCGCGGCGGCCCCCGGAGCGCCGGCGGCTG | |
| | TCGAGGCGCGGCGAGCCGCAGCCATTGCCTTTTATGGTAATCGTGC | |
| | GAGAGGGCGCAGGGACTTCCTTTGTCCCAAATCTGTGCGGAGCCGA | |
| | AATCTGGGAGGCGCCGCCGCACCCCCTCTAGCGGGCGCGGGGCGA | |
| | AGCGGTGCGGCGCCGGCAGGAAGGAAATGGGCGGGGAGGGCCTTC | |
| | GTGCGTCGCCGCGCCGCCGTCCCCTTCTCCCTCTCCAGCCTCGGGG | |
| | CTGTCCGCGGGGGGACGGCTGCCTTCGGGGGGGACGGGGCAGGG | |
| | CGGGGTTCGGCTTCTGGCGTGTGACCGGCGGCTCTAGAGCCTCTGC | |
| | TAACCATGTTCATGCCTTCTTCTTTTTCCTACAGCTCCTGGGCAACGT | |
| | GCTGGTTATTGTGCTGTCTCATCATTTTGGCAAAGAATTGGAGAATAA | |
| | ACTAGTATTCTTCTGGTCCCCACAGACTCAGAGAGAACCCGCCACCA | |
| | TGTTCGTGTTCCTGGTGCTGCTGCCCCTGGTGAGCAGCCAGTGCGT | |
| | GAACCTGACCACCAGGACCCAGCTGCCCCCCGCCTACACCAACAGC | |
| | TTCACCAGGGGCGTGTACTACCCCGACAAGGTGTTCAGGAGCAGCG | |
| | TGCTGCACAGCACCCAGGACCTGTTCCTGCCCTTCTTCAGCAACGTG | |
| | ACCTGGTTCCACGCCATCCACGTGAGCGGCACCAACGGCACCAAGA | |
| | GGTTCGACAACCCCGTGCTGCCCTTCAACGACGGCGTGTACTTCGC | |
| | CAGCACCGAGAAGAGCAACATCATCAGGGGCTGGATCTTCGGCACC | |
| | ACCCTGGACAGCAAGACCCAGAGCCTGCTGATCGTGAACAACGCCA | |
| | CCAACGTGGTGATCAAGGTGTGCGAGTTCCAGTTCTGCAACGACCC | |
| | CTTCCTGGGCGTGTACTACCACAAGAACAACAAGAGCTGGATGGAGA | |
| | GCGAGTTCAGGGTGTACAGCAGCGCCAACAACTGCACCTTCGAGTA | |
| | CGTGAGCCAGCCCTTCCTGATGGACCTGGAGGGCAAGCAGGGCAAC | |
| | TTCAAGAACCTGAGGGAGTTCGTGTTCAAGAACATCGACGGCTACTT | |
| | CAAGATCTACAGCAAGCACACCCCCATCAACCTGGTGAGGGACCTG | |
| | CCCCAGGGCTTCAGCGCCCTGGAGCCCCTGGTGGACCTGCCCATCG | |
| | GCATCAACATCACCAGGTTCCAGACCCTGCTGGCCCTGCACAGGAG | |
| | CTACCTGACCCCCGGCGACAGCAGCAGCGGCTGGACCGCCGGCGC | |
| | CGCCGCCTACTACGTGGGCTACCTGCAGCCCAGGACCTTCCTGCTG | |
| | AAGTACAACGAGAACGGCACCATCACCGACGCCGTGGACTGCGCCC | |
| | TGGACCCCCTGAGCGAGACCAAGTGCACCCTGAAGAGCTTCACCGT | |
| | GGAGAAGGGCATCTACCAGACCAGCAACTTCAGGGTGCAGCCCACC | |
| | GAGAGCATCGTGAGGTTCCCCAACATCACCAACCTGTGCCCCTTCG | |
| | GCGAGGTGTTCAACGCCACCAGGTTCGCCAGCGTGTACGCCTGGAA | |
| | CAGGAAGAGGATCAGCAACTGCGTGGCCGACTACAGCGTGCTGTAC | |
| | AACAGCGCCAGCTTCAGCACCTTCAAGTGCTACGGCGTGAGCCCCA | |
| | CCAAGCTGAACGACCTGTGCTTCACCAACGTGTACGCCGACAGCTTC | |
| | GTGATCAGGGGCGACGAGGTGAGGCAGATCGCCCCCGGCCAGACC | |
| | GGCAAGATCGCCGACTACAACTACAAGCTGCCCGACGACTTCACCG | |
| | GCTGCGTGATCGCCTGGAACAGCAACAACCTGGACAGCAAGGTGGG | |
| | CGGCAACTACAACTACCTGTACAGGCTGTTCAGGAAGAGCAACCTGA | |
| | AGCCCTTCGAGAGGGACATCAGCACCGAGATCTACCAGGCCGGCAG | |
| | CACCCCCTGCAACGGCGTGGAGGGCTTCAACTGCTACTTCCCCCTG | |
| | CAGAGCTACGGCTTCCAGCCCACCAACGGCGTGGGCTACCAGCCCT | |
| | ACAGGGTGGTGGTGCTGAGCTTCGAGCTGCTGCACGCCCCCGCCAC | |
| | CGTGTGCGGCCCCAAGAAGAGCACCAACCTGGTGAAGAACAAGTGC | |
| | GTGAACTTCAACTTCAACGGCCTGACCGGCACCGGCGTGCTGACCG | |
| | AGAGCAACAAGAAGTTCCTGCCCTTCCAGCAGTTCGGCAGGGACAT | |
| | CGCCGACACCACCGACGCCGTGAGGGACCCCCAGACCCTGGAGAT | |
| | CCTGGACATCACCCCCTGCAGCTTCGGCGGCGTGAGCGTGATCACC | |
| | CCCGGCACCAACACCAGCAACCAGGTGGCCGTGCTGTACCAGGACG | |
| | TGAACTGCACCGAGGTGCCCGTGGCCATCCACGCCGACCAGCTGAC | |
| | CCCCACCTGGAGGGTGTACAGCACCGGCAGCAACGTGTTCCAGACC | |
| | AGGGCCGGCTGCCTGATCGGCGCCGAGCACGTGAACAACAGCTAC | |
| | GAGTGCGACATCCCCATCGGCGCCGGCATCTGCGCCAGCTACCAGA | |
| | CCCAGACCAACAGCCCCAGGAGGGCCAGGAGCGTGGCCAGCCAGA | |
| | GCATCATCGCCTACACCATGAGCCTGGGCGCCGAGAACAGCGTGGC | |
| | CTACAGCAACAACAGCATCGCCATCCCCACCAACTTCACCATCAGCG | |
| | TGACCACCGAGATCCTGCCCGTGAGCATGACCAAGACCAGCGTGGA | |
| | CTGCACCATGTACATCTGCGGCGACAGCACCGAGTGCAGCAACCTG | |
| | CTGCTGCAGTACGGCAGCTTCTGCACCCAGCTGAACAGGGCCCTGA | |
| | CCGGCATCGCCGTGGAGCAGGACAAGAACACCCAGGAGGTGTTCGC | |
| | CCAGGTGAAGCAGATCTACAAGACCCCCCCCATCAAGGACTTCGGC | |
| | GGCTTCAACTTCAGCCAGATCCTGCCCGACCCCAGCAAGCCCAGCA | |
| | AGAGGAGCTTCATCGAGGACCTGCTGTTCAACAAGGTGACCCTGGC | |
| | CGACGCCGGCTTCATCAAGCAGTACGGCGACTGCCTGGGCGACATC | |
| | GCCGCCAGGGACCTGATCTGCGCCCAGAAGTTCAACGGCCTGACCG | |
| | TGCTGCCCCCCCTGCTGACCGACGAGATGATCGCCCAGTACACCAG | |
| | CGCCCTGCTGGCCGGCACCATCACCAGCGGCTGGACCTTCGGCGC | |
| | CGGCGCCGCCCTGCAGATCCCCTTCGCCATGCAGATGGCCTACAGG | |
| | TTCAACGGCATCGGCGTGACCCAGAACGTGCTGTACGAGAACCAGA | |
| | AGCTGATCGCCAACCAGTTCAACAGCGCCATCGGCAAGATCCAGGA | |
| | CAGCCTGAGCAGCACCGCCAGCGCCCTGGGCAAGCTGCAGGACGT | |
| | GGTGAACCAGAACGCCCAGGCCCTGAACACCCTGGTGAAGCAGCTG | |
| | AGCAGCAACTTCGGCGCCATCAGCAGCGTGCTGAACGACATCCTGA | |
| | GCAGGCTGGACCCCCCCGAGGCCGAGGTGCAGATCGACAGGCTGA | |
| | TCACCGGCAGGCTGCAGAGCCTGCAGACCTACGTGACCCAGCAGCT | |
| | GATCAGGGCCGCCGAGATCAGGGCCAGCGCCAACCTGGCCGCCAC | |
| | CAAGATGAGCGAGTGCGTGCTGGGCCAGAGCAAGAGGGTGGACTTC | |
| | TGCGGCAAGGGCTACCACCTGATGAGCTTCCCCCAGAGCGCCCCCC | |
| | ACGGCGTGGTGTTCCTGCACGTGACCTACGTGCCCGCCCAGGAGAA | |
| | GAACTTCACCACCGCCCCCGCCATCTGCCACGACGGCAAGGCCCAC | |
| | TTCCCCAGGGAGGGCGTGTTCGTGAGCAACGGCACCCACTGGTTCG | |
| | TGACCCAGAGGAACTTCTACGAGCCCCAGATCATCACCACCGACAAC | |
| | ACCTTCGTGAGCGGCAACTGCGACGTGGTGATCGGCATCGTGAACA | |
| | ACACCGTGTACGACCCCCTGCAGCCCGAGCTGGACAGCTTCAAGGA | |
| | GGAGCTGGACAAGTACTTCAAGAACCACACCAGCCCCGACGTGGAC | |
| | CTGGGCGACATCAGCGGCATCAACGCCAGCGTGGTGAACATCCAGA | |
| | AGGAGATCGACAGGCTGAACGAGGTGGCCAAGAACCTGAACGAGAG | |
| | CCTGATCGACCTGCAGGAGCTGGGCAAGTACGAGCAGTACATCAAG | |
| | TGGCCCTGGTACATCTGGCTGGGCTTCATCGCCGGCCTGATCGCCA | |
| | TCGTGATGGTGACCATCATGCTGTGCTGCATGACCAGCTGCTGCAGC | |
| | TGCCTGAAGGGCTGCTGCAGCTGCGGCAGCTGCTGCAAGTTCGACG | |
| | AGGACGACAGCGAGCCCGTGCTGAAGGGCGTGAAGCTGCACTACAC | |
| | CGGAAGCGGAGCCACGAACTTCTCTCTGTTAAAGCAAGCAGGAGAT | |
| | GTTGAAGAAAACCCCGGGCCTATGAAGGCAATACTAGTAGTTCTGCT | |
| | ATATACATTTGCAACCGCAAATGCAGACACATTATGTATAGGTTATCA | |
| | TGCGAACAACTCAACAGACACTGTAGACACAGTACTAGAAAAGAATG | |
| | TAACAGTAACACACTCTGTTAACCTTCTAGAAGACAAGCATAACGGGA | |
| | AACTATGCAAACTAAGAGGGGTAGCCCCATTGCATTTGGGTAAATGT | |
| | AACATTGCTGGCTGGATCCTGGGAAATCCAGAGTGTGAATCACTCTC | |
| | CACAGCAAGCTCATGGTCCTACATTGTGGAAACATCTAGTTCAGACA | |
| | ATGGAACGTGTTACCCAGGAGATTTCATCGATTATGAGGAGCTAAGA | |
| | GAGCAATTGAGCTCAGTGTCATCATTTGAAAGGTTTGAGATATTCCCC | |
| | AAGACAAGTTCATGGCCCAATCATGACTCGAACAAAGGTGTAACGAC | |
| | AGCATGTCCTCATGCTGGAGCAAAAAGCTTCTACAAAAATTTAATATG | |
| | GCTAGTTAAAAAAGGAAATTCATACCCAAAGCTCAGCAAATCCTACAT | |
| | TAATGATAAAGGGAAAGAAGTCCTCGTGCTATGGGGCATTCACCATC | |
| | CACCTACTAGTGCTGACCAACAAAGTCTCTATCAGAATGCAGATGCA | |
| | TATGTTTTTGTGGGGACATCAAGATACAGCAAGAAGTTCAAGCCGGA | |
| | AATAGCAATAAGGCCCAAAGTGAGGGATCAAGAAGGGAGAATGAACT | |
| | ATTACTGGACACTAGTAGAGCCGGGAGACAAAATAACATTCGAAGCA | |
| | ACTGGAAATCTAGTGGTACCGAGATATGCATTCGCAATGGAAAGAAA | |
| | TGCTGGATCTGGTATTATCATTTCAGATACACCAGTCCACGATTGCAA | |
| | TACAACTTGTCAGACACCCAAGGGTGCTATAAACACCAGCCTCCCAT | |
| | TTCAGAACATACATCCGATCACAATTGGAAAATGTCCAAAATATGTAA | |
| | AAAGCACAAAATTGAGACTGGCCACAGGATTGAGGAATGTCCCGTCC | |
| | ATTCAATCTAGAGGCCTATTTGGGGCCATTGCCGGTTTCATTGAAGG | |
| | GGGGTGGACAGGGATGGTAGATGGATGGTACGGTTATCACCATCAA | |
| | AATGAGCAGGGGTCAGGATATGCAGCCGACCTGAAGAGCACACAGA | |
| | ATGCCATTGACGAGATTACTAACAAAGTAAACTCTGTTATTGAAAAAA | |
| | TGAATACACAGTTCACAGCAGTAGGTAAAGAGTTCAACCACCTGGAA | |
| | AAAAGAATAGAGAATTTAAATAAAAAAGTTGATGATGGTTTCCTGGAC | |
| | ATTTGGACTTACAATGCCGAACTGTTGGTTCTATTGGAAAATGAAAGA | |
| | ACTTTGGACTACCACGATTCAAAGGTGAAGAACTTATATGAAAAGGTA | |
| | AGAAGCCAGTTAAAAAACAATGCCAAGGAAATTGGAAACGGCTGCTT | |
| | TGAATTTTACCACAAATGTGATAACACGTGCATGGAAAGTGTCAAAAA | |
| | TGGGACTTATGACTACCCAAAATACTCAGAGGAAGCAAAATTAAACA | |
| | GAGAAGAAATAGATGGGGTAAAGCTGGAATCAACAAGGATTTACCAG | |
| | ATTTTGGCGATCTATTCAACCGTCGCCAGTTCATTGGTACTGGTAGTC | |
| | TCCCTGGGGGCAATCAGTTTCTGGATGTGCTCTAATGGGTCTCTACA | |
| | GTGTAGAATATGTATTTAAGGAAGCGGAGCCACGAACTTCTCTCTGTT | |
| | AAAGCAAGCAGGAGATGTTGAAGAAAACCCCGGGCCTAGCAAAAGC | |
| | AGGGGATAATTCTATTAACCATGAAGACTATCATTGCTTTGAGCTACA | |
| | TTCTATGTCTGGTTTTCGCTCAAAAACTTCCTGGAAATGACAATAGCA | |
| | CTGCAACGCTGTGCCTTGGGCACCATGCAGTACCAAACGGAACGAT | |
| | AGTGAAAACAATCACGAATGACCAAATTGAAGTTACTAATGCTACTGA | |
| | GCTGGTTCAGAATTCCTCAATAGGTGAAATATGCGACAGTCCTCATC | |
| | AGATCCTTGATGGAGAAAACTGCACACTAATAGATGCTCTATTGGGA | |
| | GACCCTCAGTGTGATGGCTTTCAAAATAAGAAATGGGACCTTTTTGTT | |
| | GAACGAAGCAAAGCCTACAGCAACTGTTACCCTTATGATGTGCCGGA | |
| | TTATGCCTCCCTTAGGTCACTAGTTGCCTCATCCGGCACACTGGAGT | |
| | TTAACAATGAAAGCTTCAATTGGGCTGGAGTCACTCAAAACGGAACA | |
| | AGTTCTGCTTGCATAAGGGGATCTAATAGTAGTTTCTTTAGTAGATTA | |
| | AATTGGTTGACCCACTTAAACTTCAAGTACCCAGCATTGAACGTGACT | |
| | ATGCCAAACAATGAACAATTTGACAAATTGTACATTTGGGGGGTTCAC | |
| | CACCCGGGTACGGACAAGGACCAAATCTTCCTGTATGCTCAATCATC | |
| | AGGAAGAATCACAGTATCTACCAAAAGAAGCCAACAAGCTGTAATCC | |
| | CGAATATCGGATCTAGACCCAGAATAAGGAATATCCCTAGCAGAATA | |
| | AGCATCTATTGGACAATAGTAAAACCGGGAGACATACTTTTGATTAAC | |
| | AGCACAGGGAATCTAATTGCTCCTAGGGGTTACTTCAAAATACGAAG | |
| | TGGGAAAAGCTCAATAATGAGATCAGATGCACCCATTGGCAAATGCA | |
| | AGTCTGAATGCATCACTCCAAATGGAAGCATTCCCAATGACAAACCAT | |
| | TCCAAAATGTAAACAGGATCACATACGGGGCCTGTCCCAGATATGTT | |
| | AAGCAAAGCACTCTGAAATTGGCAACAGGAATGCGAAATGTACCAGA | |
| | GAAACAAACTAGAGGCATATTTGGCGCAATAGCGGGTTTCATAGAAA | |
| | ATGGTTGGGAGGGAATGGTGGATGGTTGGTACGGTTTCAGGCATCA | |
| | AAATTCTGAGGGAAGAGGACAAGCAGCAGATCTCAAAAGCACTCAAG | |
| | CAGCAATCGATCAAATCAATGGGAAGCTGAATCGATTGATCGGGAAA | |
| | ACCAACGAGAAATTCCATCAGATTGAGAAAGAATTCTCAGAAGTAGAA | |
| | GGGAGAATTCAGGACCTTGAGAAATATGTTGAGGACACAAAAATAGA | |
| | TCTCTGGTCATACAACGCAGAGCTTCTTGTTGCCCTGGAAAACCAAC | |
| | ATACAATTGATCTAACTGACTCAGAAATGAACAAACTGTTTGAAAAAA | |
| | CAAAGAAGCAACTGAGGGAAAATGCTGAGGATATGGGCAATGGTTGT | |
| | TTCAAAATATACCACAAATGTGACAATGCCTGCATAGGATCAATCAGA | |
| | AATGGAACTTATGACCACGATGTATACAGGGATGAAGCATTAAACAA | |
| | CCGGTTCCAGATCAAGGGAGTTGAGCTGAAGTCAGGGTACAAAGATT | |
| | GGATCCTATGGATTTCCTTTGCCATATCATGTTTTTTGCTTTGTGTTGC | |
| | TTTGTTGGGGTTCATCATGTGGGCCTGCCAAAAGGGCAACATTAGGT | |
| | GCAACATTTGCATTTGAGTGCATTAATTAAAAACACCCTTGTTTCTACT | |
| | GGAAGCGGAGCCACGAACTTCTCTCTGTTAAAGCAAGCAGGAGATGT | |
| | TGAAGAAAACCCCGGGCCTATTTTGTAATATCCACAAAATGAAGGCAA | |
| | TAATTGTACTACTCATGGTAGTAACATCCAATGCAGATCGAATCTGCA | |
| | CTGGGATAACATCGTCAAACTCACCACATGTCGTCAAAACTGCTACT | |
| | CAAGGGGAGGTCAACGTGACCGGTGTAATACCACTGACAACAACAC | |
| | CCACCAAATCTCATTTTGCAAATCTCAAAGGAACAGAAACCAGGGGG | |
| | AAACTATGCCCAAAATGCCTCAACTGCACAGATCTGGATGTAGCCTT | |
| | GGGCAGACCAAAATGCACAGGGAAAATACCCTCTGCAAGGGTTTCAA | |
| | TACTCCATGAAGTCAGACCTGTTACATCTGGGTGCTTTCCTATAATGC | |
| | ACGATAGAACAAAAATTAGACAGCTGCCTAACCTTCTCCGAGGATAC | |
| | GAACATGTCAGGTTATCAACTCACAACGTTATCAATGCAAAAGATGCA | |
| | CCAGGAAGACCCTACGAAATTGGAACCTCAGGGTCTTGCCCTAACAT | |
| | TACCAATGGAAACGGATTCTTCGCAACAATGGCTTGGGCCGTCCCAA | |
| | AAAACAAAACAGCAACAAATCCATTAACAATAGAAGTACCATACATTT | |
| | GTACAGAAGGAGAAGACCAAATTACCGTTTGGGGGTTCCACTCTGAC | |
| | AACGAGACCCAAATGGCAAAGCTCTATGGGGACTCAAAGCCCCAGA | |
| | AGTTCACCTCATCTGCCAACGGAGTGACCACACATTACGTTTCACAG | |
| | ATTGGTGGCTTCCCAAATCAAACAGAAGACGGAGGACTACCACAAAG | |
| | TGGCAGAATTGTTGTTGATTACATGGTGCAGAAATCTGGAAAAACAG | |
| | GAACAATTACCTATCAAAGAGGTATTTTATTGCCTCAAAAAGTGTGGT | |
| | GCGCAAGTGGCAGGAGCAAGGTAATAAAAGGATCCTTGCCCTTAATT | |
| | GGAGAAGCAGATTGCCTCCATGAAAAATACGGTGGATTAAACAAAAG | |
| | CAAGCCTTACTACACAGGGGAACATGCAAAGGCCATAGGAAATTGCC | |
| | CAATATGGGTGAAAACACCCTTGAAGCTGGCCAATGGAACCAAATAT | |
| | AGACCCCCTGCAAAACTATTAAAGGAAAGAGGTTTCTTCGGAGCCAT | |
| | TGCTGGTTTCTTAGAGGGAGGATGGGAAGGAATGATTGCAGGTTGG | |
| | CACGGATACACATCCCATGGGGCACATGGAGTAGCGGTGGCAGCTG | |
| | ACCTTAAGAGCACTCAAGAGGCCATAAACAAGATAACAAAAAATCTCA | |
| | ACTCTTTGAGTGAGCTGGAAGTAAAGAATCTTCAAAGACTAAGCGGT | |
| | GCCATGGATGAACTCCACAACGAAATACTAGAACTAGATGAGAAAGT | |
| | GGATGATCTCAGAGCTGACACAATAAGCTCACAAATAGAACTCGCAG | |
| | TCCTGCTTTCCAATGAAGGAATAATAAACAGTGAAGATGAACATCTCT | |
| | TGGCGCTTGAAAGAAAGCTGAAGAAAATGCTGGGCCCCTCTGCTGTA | |
| | GAGATAGGGAATGGATGCTTTGAAACCAAACACAAGTGCAACCAGAC | |
| | CTGCCTCGACAGAATAGCTGCTGGTACCTTTGATGCAGGAGAATTTT | |
| | CTCTCCCCACCTTTGATTCACTGAATATTACTGCTGCATCTTTAAATG | |
| | ACGACGGATTGGACAATCATACTATACTGCTTTACTACTCAACTGCTG | |
| | CCTCCAGTTTGGCTGTAACACTGATGATAGCTATCTTTGTTGTTTATA | |
| | TGGTCTCCAGAGACAATGTTTCTTGCTCCATTTGTCTATAAGGAAAGT | |
| | TAAGCCCTGTATTTTCCTTTATTGTAGTGCTTGTTTGCTTGTTGTCATT | |
| | ACAAAGAAACGTTATTGAAAAATGGAAGCGGAGCCACGAACTTCTCT | |
| | CTGTTAAAGCAAGCAGGAGATGTTGAAGAAAACCCCGGGCCTTTCGG | |
| | AGCTATTGCTGGTTTCTTGGAAGGAGGATGGGAAGGAATGATTGCAG | |
| | GTTGGCACGGATACACATCTCATGGAGCACATGGAGTAGCAGTGGC | |
| | AGCAGACCTTAAGAGTACCCATGATGACTCGAGCTGGTACTGCATGC | |
| | ACGCAATGCTAGCTGCCCCTTTCCCGTCCTGGGTACCCCGAGTCTCC | |
| | CCCGACCTCGGGTCCCAGGTATGCTCCCACCTCCACCTGCCCCACT | |
| | CACCACCTCTGCTAGTTCCAGACACCTCCCAAGCACGCAGCAATGCA | |
| | GCTCAAAACGCTTAGCCTAGCCACACCCCCACGGGAAACAGCAGTG | |
| | ATTAACCTTTAGCAATAAACGAAAGTTTAACTAAGCTATACTAACCCC | |
| | AGGGTTGGTCAATTTCGTGCCAGCCACACCCTGGAGCTAGCAAAAAA | |
| | AA | |
| Pan-CoV-Flu | TAGTTATTAATAGTAATCAATTACGGGGTCATTAGTTCATAGCCCATAT | 403 |
| Vaccine #15 | ATGGAGTTCCGCGTTACATAACTTACGGTAAATGGCCCGCCTGGCTG | |
| CoV- Omicron | ACCGCCCAACGACCCCCGCCCATTGACGTCAATAATGACGTATGTTC | |
| BA.2 | CCATAGTAACGCCAATAGGGACTTTCCATTGACGTCAATGGGTGGAG | |
| Spike(HexaPro)- | TATTTACGGTAAACTGCCCACTTGGCAGTACATCAAGTGTATCATATG | |
| Influenza (HA) | CCAAGTACGCCCCCTATTGACGTCAATGACGGTAAATGGCCCGCCTG | |
| | GCATTATGCCCAGTACATGACCTTATGGGACTTTCCTACTTGGCAGTA | |
| | CATCTACGTATTAGTCATCGCTATTACCATGGTGATGCGGTTTTGGCA | |
| | GTACATCAATGGGCGTGGATAGCGGTTTGACTCACGGGGATTTCCAA | |
| | GTCTCCACCCCATTGACGTCAATGGGAGTTTGTTTTGGCACCAAAAT | |
| | CAACGGGACTTTCCAAAATGTCGTAACAACTCCGCCCCATTGACGCA | |
| | AATGGGCGGTAGGCGTGTACGGTGGGAGGTCTATATAAGCAGAGCT | |
| | GGTTTAGTGAACCGTCAGATCGAGAATAAACTAGTATTCTTCTGGTCC | |
| | CCACAGACTCAGAGAGAACCCGCCACCATGTTCGTGTTCCTGGTGCT | |
| | GCTGCCCCTGGTGAGCAGCCAGTGCGTGAACCTGATCACCAGGACC | |
| | CAGAGCTACACCAACAGCTTCACCAGGGGCGTGTACTACCCCGACA | |
| | AGGTGTTCAGGAGCAGCGTGCTGCACAGCACCCAGGACCTGTTCCT | |
| | GCCCTTCTTCAGCAACGTGACCTGGTTCCACGCCATCCACGTGAGC | |
| | GGCACCAACGGCACCAAGAGGTTCGACAACCCCGTGCTGCCCTTCA | |
| | ACGACGGCGTGTACTTCGCCAGCACCGAGAAGAGCAACATCATCAG | |
| | GGGCTGGATCTTCGGCACCACCCTGGACAGCAAGACCCAGAGCCTG | |
| | CTGATCGTGAACAACGCCACCAACGTGGTGATCAAGGTGTGCGAGTT | |
| | CCAGTTCTGCAACGACCCCTTCCTGGACGTGTACTACCACAAGAACA | |
| | ACAAGAGCTGGATGGAGAGCGAGTTCAGGGTGTACAGCAGCGCCAA | |
| | CAACTGCACCTTCGAGTACGTGAGCCAGCCCTTCCTGATGGACCTG | |
| | GAGGGCAAGCAGGGCAACTTCAAGAACCTGAGGGAGTTCGTGTTCA | |
| | AGAACATCGACGGCTACTTCAAGATCTACAGCAAGCACACCCCCATC | |
| | AACCTGGGCAGGGACCTGCCCCAGGGCTTCAGCGCCCTGGAGCCC | |
| | CTGGTGGACCTGCCCATCGGCATCAACATCACCAGGTTCCAGACCCT | |
| | GCTGGCCCTGCACAGGAGCTACCTGACCCCCGGCGACAGCAGCAG | |
| | CGGCTGGACCGCCGGCGCCGCCGCCTACTACGTGGGCTACCTGCA | |
| | GCCCAGGACCTTCCTGCTGAAGTACAACGAGAACGGCACCATCACC | |
| | GACGCCGTGGACTGCGCCCTGGACCCCCTGAGCGAGACCAAGTGC | |
| | ACCCTGAAGAGCTTCACCGTGGAGAAGGGCATCTACCAGACCAGCA | |
| | ACTTCAGGGTGCAGCCCACCGAGAGCATCGTGAGGTTCCCCAACAT | |
| | CACCAACCTGTGCCCCTTCGACGAGGTGTTCAACGCCACCAGGTTC | |
| | GCCAGCGTGTACGCCTGGAACAGGAAGAGGATCAGCAACTGCGTGG | |
| | CCGACTACAGCGTGCTGTACAACTTCGCCCCCTTCTTCGCCTTCAAG | |
| | TGCTACGGCGTGAGCCCCACCAAGCTGAACGACCTGTGCTTCACCA | |
| | ACGTGTACGCCGACAGCTTCGTGATCAGGGGCAACGAGGTGAGCCA | |
| | GATCGCCCCCGGCCAGACCGGCAACATCGCCGACTACAACTACAAG | |
| | CTGCCCGACGACTTCACCGGCTGCGTGATCGCCTGGAACAGCAACA | |
| | AGCTGGACAGCAAGGTGGGCGGCAACTACAACTACCTGTACAGGCT | |
| | GTTCAGGAAGAGCAACCTGAAGCCCTTCGAGAGGGACATCAGCACC | |
| | GAGATCTACCAGGCCGGCAACAAGCCCTGCAACGGCGTGGCCGGCT | |
| | TCAACTGCTACTTCCCCCTGAGGAGCTACGGCTTCAGGCCCACCTAC | |
| | GGCGTGGGCCACCAGCCCTACAGGGTGGTGGTGCTGAGCTTCGAG | |
| | CTGCTGCACGCCCCCGCCACCGTGTGCGGCCCCAAGAAGAGCACCA | |
| | ACCTGGTGAAGAACAAGTGCGTGAACTTCAACTTCAACGGCCTGACC | |
| | GGCACCGGCGTGCTGACCGAGAGCAACAAGAAGTTCCTGCCCTTCC | |
| | AGCAGTTCGGCAGGGACATCGCCGACACCACCGACGCCGTGAGGG | |
| | ACCCCCAGACCCTGGAGATCCTGGACATCACCCCCTGCAGCTTCGG | |
| | CGGCGTGAGCGTGATCACCCCCGGCACCAACACCAGCAACCAGGTG | |
| | GCCGTGCTGTACCAGGGCGTGAACTGCACCGAGGTGCCCGTGGCC | |
| | ATCCACGCCGACCAGCTGACCCCCACCTGGAGGGTGTACAGCACCG | |
| | GCAGCAACGTGTTCCAGACCAGGGCCGGCTGCCTGATCGGCGCCG | |
| | AGTACGTGAACAACAGCTACGAGTGCGACATCCCCATCGGCGCCGG | |
| | CATCTGCGCCAGCTACCAGACCCAGACCAAGAGCCACCAGCAGGCC | |
| | CAGAGCGTGGCCAGCCAGAGCATCATCGCCTACACCATGAGCCTGG | |
| | GCGCCGAGAACAGCGTGGCCTACAGCAACAACAGCATCGCCATCCC | |
| | CACCAACTTCACCATCAGCGTGACCACCGAGATCCTGCCCGTGAGC | |
| | ATGACCAAGACCAGCGTGGACTGCACCATGTACATCTGCGGCGACA | |
| | GCACCGAGTGCAGCAACCTGCTGCTGCAGTACGGCAGCTTCTGCAC | |
| | CCAGCTGAAGAGGGCCCTGACCGGCATCGCCGTGGAGCAGGACAA | |
| | GAACACCCAGGAGGTGTTCGCCCAGGTGAAGCAGATCTACAAGACC | |
| | CCCCCCATCAAGTACTTCGGCGGCTTCAACTTCAGCCAGATCCTGCC | |
| | CGACCCCAGCAAGCCCAGCAAGAGGAGCCCCATCGAGGACCTGCTG | |
| | TTCAACAAGGTGACCCTGGCCGACGCCGGCTTCATCAAGCAGTACG | |
| | GCGACTGCCTGGGCGACATCGCCGCCAGGGACCTGATCTGCGCCC | |
| | AGAAGTTCAACGGCCTGACCGTGCTGCCCCCCCTGCTGACCGACGA | |
| | GATGATCGCCCAGTACACCAGCGCCCTGCTGGCCGGCACCATCACC | |
| | AGCGGCTGGACCTTCGGCGCCGGCCCCGCCCTGCAGATCCCCTTCC | |
| | CCATGCAGATGGCCTACAGGTTCAACGGCATCGGCGTGACCCAGAA | |
| | CGTGCTGTACGAGAACCAGAAGCTGATCGCCAACCAGTTCAACAGC | |
| | GCCATCGGCAAGATCCAGGACAGCCTGAGCAGCACCCCCAGCGCCC | |
| | TGGGCAAGCTGCAGGACGTGGTGAACCACAACGCCCAGGCCCTGAA | |
| | CACCCTGGTGAAGCAGCTGAGCAGCAAGTTCGGCGCCATCAGCAGC | |
| | GTGCTGAACGACATCCTGAGCAGGCTGGACCCCCCCGAGGCCGAG | |
| | GTGCAGATCGACAGGCTGATCACCGGCAGGCTGCAGAGCCTGCAGA | |
| | CCTACGTGACCCAGCAGCTGATCAGGGCCGCCGAGATCAGGGCCAG | |
| | CGCCAACCTGGCCGCCACCAAGATGAGCGAGTGCGTGCTGGGCCA | |
| | GAGCAAGAGGGTGGACTTCTGCGGCAAGGGCTACCACCTGATGAGC | |
| | TTCCCCCAGAGCGCCCCCCACGGCGTGGTGTTCCTGCACGTGACCT | |
| | ACGTGCCCGCCCAGGAGAAGAACTTCACCACCGCCCCCGCCATCTG | |
| | CCACGACGGCAAGGCCCACTTCCCCAGGGAGGGCGTGTTCGTGAG | |
| | CAACGGCACCCACTGGTTCGTGACCCAGAGGAACTTCTACGAGCCC | |
| | CAGATCATCACCACCGACAACACCTTCGTGAGCGGCAACTGCGACG | |
| | TGGTGATCGGCATCGTGAACAACACCGTGTACGACCCCCTGCAGCC | |
| | CGAGCTGGACAGCTTCAAGGAGGAGCTGGACAAGTACTTCAAGAAC | |
| | CACACCAGCCCCGACGTGGACCTGGGCGACATCAGCGGCATCAACG | |
| | CCAGCGTGGTGAACATCCAGAAGGAGATCGACAGGCTGAACGAGGT | |
| | GGCCAAGAACCTGAACGAGAGCCTGATCGACCTGCAGGAGCTGGGC | |
| | AAGTACGAGCAGTACATCAAGTGGCCCTGGTACATCTGGCTGGGCTT | |
| | CATCGCCGGCCTGATCGCCATCGTGATGGTGACCATCATGCTGTGCT | |
| | GCATGACCAGCTGCTGCAGCTGCCTGAAGGGCTGCTGCAGCTGCGG | |
| | CAGCTGCTGCAAGTTCGACGAGGACGACAGCGAGCCCGTGCTGAAG | |
| | GGCGTGAAGCTGCACTACACCGGAAGCGGAGCCACGAACTTCTCTC | |
| | TGTTAAAGCAAGCAGGAGATGTTGAAGAAAACCCCGGGCCTATGAAG | |
| | GCAATACTAGTAGTTCTGCTATATACATTTGCAACCGCAAATGCAGAC | |
| | ACATTATGTATAGGTTATCATGCGAACAACTCAACAGACACTGTAGAC | |
| | ACAGTACTAGAAAAGAATGTAACAGTAACACACTCTGTTAACCTTCTA | |
| | GAAGACAAGCATAACGGGAAACTATGCAAACTAAGAGGGGTAGCCC | |
| | CATTGCATTTGGGTAAATGTAACATTGCTGGCTGGATCCTGGGAAAT | |
| | CCAGAGTGTGAATCACTCTCCACAGCAAGCTCATGGTCCTACATTGT | |
| | GGAAACATCTAGTTCAGACAATGGAACGTGTTACCCAGGAGATTTCA | |
| | TCGATTATGAGGAGCTAAGAGAGCAATTGAGCTCAGTGTCATCATTT | |
| | GAAAGGTTTGAGATATTCCCCAAGACAAGTTCATGGCCCAATCATGA | |
| | CTCGAACAAAGGTGTAACGACAGCATGTCCTCATGCTGGAGCAAAAA | |
| | GCTTCTACAAAAATTTAATATGGCTAGTTAAAAAAGGAAATTCATACC | |
| | CAAAGCTCAGCAAATCCTACATTAATGATAAAGGGAAAGAAGTCCTC | |
| | GTGCTATGGGGCATTCACCATCCACCTACTAGTGCTGACCAACAAAG | |
| | TCTCTATCAGAATGCAGATGCATATGTTTTTGTGGGGACATCAAGATA | |
| | CAGCAAGAAGTTCAAGCCGGAAATAGCAATAAGGCCCAAAGTGAGG | |
| | GATCAAGAAGGGAGAATGAACTATTACTGGACACTAGTAGAGCCGGG | |
| | AGACAAAATAACATTCGAAGCAACTGGAAATCTAGTGGTACCGAGAT | |
| | ATGCATTCGCAATGGAAAGAAATGCTGGATCTGGTATTATCATTTCAG | |
| | ATACACCAGTCCACGATTGCAATACAACTTGTCAGACACCCAAGGGT | |
| | GCTATAAACACCAGCCTCCCATTTCAGAACATACATCCGATCACAATT | |
| | GGAAAATGTCCAAAATATGTAAAAAGCACAAAATTGAGACTGGCCAC | |
| | AGGATTGAGGAATGTCCCGTCCATTCAATCTAGAGGCCTATTTGGGG | |
| | CCATTGCCGGTTTCATTGAAGGGGGGTGGACAGGGATGGTAGATGG | |
| | ATGGTACGGTTATCACCATCAAAATGAGCAGGGGTCAGGATATGCAG | |
| | CCGACCTGAAGAGCACACAGAATGCCATTGACGAGATTACTAACAAA | |
| | GTAAACTCTGTTATTGAAAAAATGAATACACAGTTCACAGCAGTAGGT | |
| | AAAGAGTTCAACCACCTGGAAAAAAGAATAGAGAATTTAAATAAAAAA | |
| | GTTGATGATGGTTTCCTGGACATTTGGACTTACAATGCCGAACTGTTG | |
| | GTTCTATTGGAAAATGAAAGAACTTTGGACTACCACGATTCAAAGGTG | |
| | AAGAACTTATATGAAAAGGTAAGAAGCCAGTTAAAAAACAATGCCAAG | |
| | GAAATTGGAAACGGCTGCTTTGAATTTTACCACAAATGTGATAACACG | |
| | TGCATGGAAAGTGTCAAAAATGGGACTTATGACTACCCAAAATACTCA | |
| | GAGGAAGCAAAATTAAACAGAGAAGAAATAGATGGGGTAAAGCTGGA | |
| | ATCAACAAGGATTTACCAGATTTTGGCGATCTATTCAACCGTCGCCAG | |
| | TTCATTGGTACTGGTAGTCTCCCTGGGGGCAATCAGTTTCTGGATGT | |
| | GCTCTAATGGGTCTCTACAGTGTAGAATATGTATTTAAGGAAGCGGA | |
| | GCCACGAACTTCTCTCTGTTAAAGCAAGCAGGAGATGTTGAAGAAAA | |
| | CCCCGGGCCTAGCAAAAGCAGGGGATAATTCTATTAACCATGAAGAC | |
| | TATCATTGCTTTGAGCTACATTCTATGTCTGGTTTTCGCTCAAAAACTT | |
| | CCTGGAAATGACAATAGCACTGCAACGCTGTGCCTTGGGCACCATGC | |
| | AGTACCAAACGGAACGATAGTGAAAACAATCACGAATGACCAAATTG | |
| | AAGTTACTAATGCTACTGAGCTGGTTCAGAATTCCTCAATAGGTGAAA | |
| | TATGCGACAGTCCTCATCAGATCCTTGATGGAGAAAACTGCACACTA | |
| | ATAGATGCTCTATTGGGAGACCCTCAGTGTGATGGCTTTCAAAATAA | |
| | GAAATGGGACCTTTTTGTTGAACGAAGCAAAGCCTACAGCAACTGTT | |
| | ACCCTTATGATGTGCCGGATTATGCCTCCCTTAGGTCACTAGTTGCC | |
| | TCATCCGGCACACTGGAGTTTAACAATGAAAGCTTCAATTGGGCTGG | |
| | AGTCACTCAAAACGGAACAAGTTCTGCTTGCATAAGGGGATCTAATA | |
| | GTAGTTTCTTTAGTAGATTAAATTGGTTGACCCACTTAAACTTCAAGTA | |
| | CCCAGCATTGAACGTGACTATGCCAAACAATGAACAATTTGACAAATT | |
| | GTACATTTGGGGGGTTCACCACCCGGGTACGGACAAGGACCAAATC | |
| | TTCCTGTATGCTCAATCATCAGGAAGAATCACAGTATCTACCAAAAGA | |
| | AGCCAACAAGCTGTAATCCCGAATATCGGATCTAGACCCAGAATAAG | |
| | GAATATCCCTAGCAGAATAAGCATCTATTGGACAATAGTAAAACCGG | |
| | GAGACATACTTTTGATTAACAGCACAGGGAATCTAATTGCTCCTAGG | |
| | GGTTACTTCAAAATACGAAGTGGGAAAAGCTCAATAATGAGATCAGAT | |
| | GCACCCATTGGCAAATGCAAGTCTGAATGCATCACTCCAAATGGAAG | |
| | CATTCCCAATGACAAACCATTCCAAAATGTAAACAGGATCACATACGG | |
| | GGCCTGTCCCAGATATGTTAAGCAAAGCACTCTGAAATTGGCAACAG | |
| | GAATGCGAAATGTACCAGAGAAACAAACTAGAGGCATATTTGGCGCA | |
| | ATAGCGGGTTTCATAGAAAATGGTTGGGAGGGAATGGTGGATGGTTG | |
| | GTACGGTTTCAGGCATCAAAATTCTGAGGGAAGAGGACAAGCAGCA | |
| | GATCTCAAAAGCACTCAAGCAGCAATCGATCAAATCAATGGGAAGCT | |
| | GAATCGATTGATCGGGAAAACCAACGAGAAATTCCATCAGATTGAGA | |
| | AAGAATTCTCAGAAGTAGAAGGGAGAATTCAGGACCTTGAGAAATAT | |
| | GTTGAGGACACAAAAATAGATCTCTGGTCATACAACGCAGAGCTTCT | |
| | TGTTGCCCTGGAAAACCAACATACAATTGATCTAACTGACTCAGAAAT | |
| | GAACAAACTGTTTGAAAAAACAAAGAAGCAACTGAGGGAAAATGCTG | |
| | AGGATATGGGCAATGGTTGTTTCAAAATATACCACAAATGTGACAATG | |
| | CCTGCATAGGATCAATCAGAAATGGAACTTATGACCACGATGTATACA | |
| | GGGATGAAGCATTAAACAACCGGTTCCAGATCAAGGGAGTTGAGCTG | |
| | AAGTCAGGGTACAAAGATTGGATCCTATGGATTTCCTTTGCCATATCA | |
| | TGTTTTTTGCTTTGTGTTGCTTTGTTGGGGTTCATCATGTGGGCCTGC | |
| | CAAAAGGGCAACATTAGGTGCAACATTTGCATTTGAGTGCATTAATTA | |
| | AAAACACCCTTGTTTCTACTGGAAGCGGAGCCACGAACTTCTCTCTG | |
| | TTAAAGCAAGCAGGAGATGTTGAAGAAAACCCCGGGCCTATTTTCTA | |
| | ATATCCACAAAATGAAGGCAATAATTGTACTACTCATGGTAGTAACAT | |
| | CCAATGCAGATCGAATCTGCACTGGGATAACATCGTCAAACTCACCA | |
| | CATGTCGTCAAAACTGCTACTCAAGGGGAGGTCAACGTGACCGGTGT | |
| | AATACCACTGACAACAACACCCACCAAATCTCATTTTGCAAATCTCAA | |
| | AGGAACAGAAACCAGGGGGAAACTATGCCCAAAATGCCTCAACTGCA | |
| | CAGATCTGGATGTAGCCTTGGGCAGACCAAAATGCACAGGGAAAATA | |
| | CCCTCTGCAAGGGTTTCAATACTCCATGAAGTCAGACCTGTTACATCT | |
| | GGGTGCTTTCCTATAATGCACGATAGAACAAAAATTAGACAGCTGCC | |
| | TAACCTTCTCCGAGGATACGAACATGTCAGGTTATCAACTCACAACGT | |
| | TATCAATGCAAAAGATGCACCAGGAAGACCCTACGAAATTGGAACCT | |
| | CAGGGTCTTGCCCTAACATTACCAATGGAAACGGATTCTTCGCAACA | |
| | ATGGCTTGGGCCGTCCCAAAAAACAAAACAGCAACAAATCCATTAAC | |
| | AATAGAAGTACCATACATTTGTACAGAAGGAGAAGACCAAATTACCGT | |
| | TTGGGGGTTCCACTCTGACAACGAGACCCAAATGGCAAAGCTCTATG | |
| | GGGACTCAAAGCCCCAGAAGTTCACCTCATCTGCCAACGGAGTGAC | |
| | CACACATTACGTTTCACAGATTGGTGGCTTCCCAAATCAAACAGAAGA | |
| | CGGAGGACTACCACAAAGTGGCAGAATTGTTGTTGATTACATGGTGC | |
| | AGAAATCTGGAAAAACAGGAACAATTACCTATCAAAGAGGTATTTTAT | |
| | TGCCTCAAAAAGTGTGGTGCGCAAGTGGCAGGAGCAAGGTAATAAAA | |
| | GGATCCTTGCCCTTAATTGGAGAAGCAGATTGCCTCCATGAAAAATA | |
| | CGGTGGATTAAACAAAAGCAAGCCTTACTACACAGGGGAACATGCAA | |
| | AGGCCATAGGAAATTGCCCAATATGGGTGAAAACACCCTTGAAGCTG | |
| | GCCAATGGAACCAAATATAGACCCCCTGCAAAACTATTAAAGGAAAG | |
| | AGGTTTCTTCGGAGCCATTGCTGGTTTCTTAGAGGGAGGATGGGAAG | |
| | GAATGATTGCAGGTTGGCACGGATACACATCCCATGGGGCACATGG | |
| | AGTAGCGGTGGCAGCTGACCTTAAGAGCACTCAAGAGGCCATAAAC | |
| | AAGATAACAAAAAATCTCAACTCTTTGAGTGAGCTGGAAGTAAAGAAT | |
| | CTTCAAAGACTAAGCGGTGCCATGGATGAACTCCACAACGAAATACT | |
| | AGAACTAGATGAGAAAGTGGATGATCTCAGAGCTGACACAATAAGCT | |
| | CACAAATAGAACTCGCAGTCCTGCTTTCCAATGAAGGAATAATAAACA | |
| | GTGAAGATGAACATCTCTTGGCGCTTGAAAGAAAGCTGAAGAAAATG | |
| | CTGGGCCCCTCTGCTGTAGAGATAGGGAATGGATGCTTTGAAACCAA | |
| | ACACAAGTGCAACCAGACCTGCCTCGACAGAATAGCTGCTGGTACCT | |
| | TTGATGCAGGAGAATTTTCTCTCCCCACCTTTGATTCACTGAATATTA | |
| | CTGCTGCATCTTTAAATGACGACGGATTGGACAATCATACTATACTGC | |
| | TTTACTACTCAACTGCTGCCTCCAGTTTGGCTGTAACACTGATGATAG | |
| | CTATCTTTGTTGTTTATATGGTCTCCAGAGACAATGTTTCTTGCTCCAT | |
| | TTGTCTATAAGGAAAGTTAAGCCCTGTATTTTCCTTTATTGTAGTGCTT | |
| | GTTTGCTTGTTGTCATTACAAAGAAACGTTATTGAAAAATTGATGACT | |
| | CGAGCTGGTACTGCATGCACGCAATGCTAGCTGCCCCTTTCCCGTCC | |
| | TGGGTACCCCGAGTCTCCCCCGACCTCGGGTCCCAGGTATGCTCCC | |
| | ACCTCCACCTGCCCCACTCACCACCTCTGCTAGTTCCAGACACCTCC | |
| | CAAGCACGCAGCAATGCAGCTCAAAACGCTTAGCCTAGCCACACCC | |
| | CCACGGGAAACAGCAGTGATTAACCTTTAGCAATAAACGAAAGTTTAA | |
| | CTAAGCTATACTAACCCCAGGGTTGGTCAATTTCGTGCCAGCCACAC | |
| | CCTGGAGCTAGCAAAAAAAA | |
| Pan-CoV-Flu | TAGTTATTAATAGTAATCAATTACGGGGTCATTAGTTCATAGCCCATAT | 404 |
| Vaccine #16 | ATGGAGTTCCGCGTTACATAACTTACGGTAAATGGCCCGCCTGGCTG | |
| CoV-Omicron | ACCGCCCAACGACCCCCGCCCATTGACGTCAATAATGACGTATGTTC | |
| BA.2 Spike(2 | CCATAGTAACGCCAATAGGGACTTTCCATTGACGTCAATGGGTGGAG | |
| proline | TATTTACGGTAAACTGCCCACTTGGCAGTACATCAAGTGTATCATATG | |
| substitution)- | CCAAGTACGCCCCCTATTGACGTCAATGACGGTAAATGGCCCGCCTG | |
| Influenza (HA) | GCATTATGCCCAGTACATGACCTTATGGGACTTTCCTACTTGGCAGTA | |
| | CATCTACGTATTAGTCATCGCTATTACCATGGTGATGCGGTTTTGGCA | |
| | GTACATCAATGGGCGTGGATAGCGGTTTGACTCACGGGGATTTCCAA | |
| | GTCTCCACCCCATTGACGTCAATGGGAGTTTGTTTTGGCACCAAAAT | |
| | CAACGGGACTTTCCAAAATGTCGTAACAACTCCGCCCCATTGACGCA | |
| | AATGGGCGGTAGGCGTGTACGGTGGGAGGTCTATATAAGCAGAGCT | |
| | GGTTTAGTGAACCGTCAGATCGAGAATAAACTAGTATTCTTCTGGTCC | |
| | CCACAGACTCAGAGAGAACCCGCCACCATGTTCGTGTTCCTGGTGCT | |
| | GCTGCCCCTGGTGAGCAGCCAGTGCGTGAACCTGATCACCAGGACC | |
| | CAGAGCTACACCAACAGCTTCACCAGGGGCGTGTACTACCCCGACA | |
| | AGGTGTTCAGGAGCAGCGTGCTGCACAGCACCCAGGACCTGTTCCT | |
| | GCCCTTCTTCAGCAACGTGACCTGGTTCCACGCCATCCACGTGAGC | |
| | GGCACCAACGGCACCAAGAGGTTCGACAACCCCGTGCTGCCCTTCA | |
| | ACGACGGCGTGTACTTCGCCAGCACCGAGAAGAGCAACATCATCAG | |
| | GGGCTGGATCTTCGGCACCACCCTGGACAGCAAGACCCAGAGCCTG | |
| | CTGATCGTGAACAACGCCACCAACGTGGTGATCAAGGTGTGCGAGTT | |
| | CCAGTTCTGCAACGACCCCTTCCTGGACGTGTACTACCACAAGAACA | |
| | ACAAGAGCTGGATGGAGAGCGAGTTCAGGGTGTACAGCAGCGCCAA | |
| | CAACTGCACCTTCGAGTACGTGAGCCAGCCCTTCCTGATGGACCTG | |
| | GAGGGCAAGCAGGGCAACTTCAAGAACCTGAGGGAGTTCGTGTTCA | |
| | AGAACATCGACGGCTACTTCAAGATCTACAGCAAGCACACCCCCATC | |
| | AACCTGGGCAGGGACCTGCCCCAGGGCTTCAGCGCCCTGGAGCCC | |
| | CTGGTGGACCTGCCCATCGGCATCAACATCACCAGGTTCCAGACCCT | |
| | GCTGGCCCTGCACAGGAGCTACCTGACCCCCGGCGACAGCAGCAG | |
| | CGGCTGGACCGCCGGCGCCGCCGCCTACTACGTGGGCTACCTGCA | |
| | GCCCAGGACCTTCCTGCTGAAGTACAACGAGAACGGCACCATCACC | |
| | GACGCCGTGGACTGCGCCCTGGACCCCCTGAGCGAGACCAAGTGC | |
| | ACCCTGAAGAGCTTCACCGTGGAGAAGGGCATCTACCAGACCAGCA | |
| | ACTTCAGGGTGCAGCCCACCGAGAGCATCGTGAGGTTCCCCAACAT | |
| | CACCAACCTGTGCCCCTTCGACGAGGTGTTCAACGCCACCAGGTTC | |
| | GCCAGCGTGTACGCCTGGAACAGGAAGAGGATCAGCAACTGCGTGG | |
| | CCGACTACAGCGTGCTGTACAACTTCGCCCCCTTCTTCGCCTTCAAG | |
| | TGCTACGGCGTGAGCCCCACCAAGCTGAACGACCTGTGCTTCACCA | |
| | ACGTGTACGCCGACAGCTTCGTGATCAGGGGCAACGAGGTGAGCCA | |
| | GATCGCCCCCGGCCAGACCGGCAACATCGCCGACTACAACTACAAG | |
| | CTGCCCGACGACTTCACCGGCTGCGTGATCGCCTGGAACAGCAACA | |
| | AGCTGGACAGCAAGGTGGGCGGCAACTACAACTACCTGTACAGGCT | |
| | GTTCAGGAAGAGCAACCTGAAGCCCTTCGAGAGGGACATCAGCACC | |
| | GAGATCTACCAGGCCGGCAACAAGCCCTGCAACGGCGTGGCCGGCT | |
| | TCAACTGCTACTTCCCCCTGAGGAGCTACGGCTTCAGGCCCACCTAC | |
| | GGCGTGGGCCACCAGCCCTACAGGGTGGTGGTGCTGAGCTTCGAG | |
| | CTGCTGCACGCCCCCGCCACCGTGTGCGGCCCCAAGAAGAGCACCA | |
| | ACCTGGTGAAGAACAAGTGCGTGAACTTCAACTTCAACGGCCTGACC | |
| | GGCACCGGCGTGCTGACCGAGAGCAACAAGAAGTTCCTGCCCTTCC | |
| | AGCAGTTCGGCAGGGACATCGCCGACACCACCGACGCCGTGAGGG | |
| | ACCCCCAGACCCTGGAGATCCTGGACATCACCCCCTGCAGCTTCGG | |
| | CGGCGTGAGCGTGATCACCCCCGGCACCAACACCAGCAACCAGGTG | |
| | GCCGTGCTGTACCAGGGCGTGAACTGCACCGAGGTGCCCGTGGCC | |
| | ATCCACGCCGACCAGCTGACCCCCACCTGGAGGGTGTACAGCACCG | |
| | GCAGCAACGTGTTCCAGACCAGGGCCGGCTGCCTGATCGGCGCCG | |
| | AGTACGTGAACAACAGCTACGAGTGCGACATCCCCATCGGCGCCGG | |
| | CATCTGCGCCAGCTACCAGACCCAGACCAAGAGCCACCAGCAGGCC | |
| | CAGAGCGTGGCCAGCCAGAGCATCATCGCCTACACCATGAGCCTGG | |
| | GCGCCGAGAACAGCGTGGCCTACAGCAACAACAGCATCGCCATCCC | |
| | CACCAACTTCACCATCAGCGTGACCACCGAGATCCTGCCCGTGAGC | |
| | ATGACCAAGACCAGCGTGGACTGCACCATGTACATCTGCGGCGACA | |
| | GCACCGAGTGCAGCAACCTGCTGCTGCAGTACGGCAGCTTCTGCAC | |
| | CCAGCTGAAGAGGGCCCTGACCGGCATCGCCGTGGAGCAGGACAA | |
| | GAACACCCAGGAGGTGTTCGCCCAGGTGAAGCAGATCTACAAGACC | |
| | CCCCCCATCAAGTACTTCGGCGGCTTCAACTTCAGCCAGATCCTGCC | |
| | CGACCCCAGCAAGCCCAGCAAGAGGAGCTTCATCGAGGACCTGCTG | |
| | TTCAACAAGGTGACCCTGGCCGACGCCGGCTTCATCAAGCAGTACG | |
| | GCGACTGCCTGGGCGACATCGCCGCCAGGGACCTGATCTGCGCCC | |
| | AGAAGTTCAACGGCCTGACCGTGCTGCCCCCCCTGCTGACCGACGA | |
| | GATGATCGCCCAGTACACCAGCGCCCTGCTGGCCGGCACCATCACC | |
| | AGCGGCTGGACCTTCGGCGCCGGCGCCGCCCTGCAGATCCCCTTC | |
| | GCCATGCAGATGGCCTACAGGTTCAACGGCATCGGCGTGACCCAGA | |
| | ACGTGCTGTACGAGAACCAGAAGCTGATCGCCAACCAGTTCAACAGC | |
| | GCCATCGGCAAGATCCAGGACAGCCTGAGCAGCACCGCCAGCGCC | |
| | CTGGGCAAGCTGCAGGACGTGGTGAACCACAACGCCCAGGCCCTGA | |
| | ACACCCTGGTGAAGCAGCTGAGCAGCAAGTTCGGCGCCATCAGCAG | |
| | CGTGCTGAACGACATCCTGAGCAGGCTGGACCCCCCCGAGGCCGA | |
| | GGTGCAGATCGACAGGCTGATCACCGGCAGGCTGCAGAGCCTGCAG | |
| | ACCTACGTGACCCAGCAGCTGATCAGGGCCGCCGAGATCAGGGCCA | |
| | GCGCCAACCTGGCCGCCACCAAGATGAGCGAGTGCGTGCTGGGCC | |
| | AGAGCAAGAGGGTGGACTTCTGCGGCAAGGGCTACCACCTGATGAG | |
| | CTTCCCCCAGAGCGCCCCCCACGGCGTGGTGTTCCTGCACGTGACC | |
| | TACGTGCCCGCCCAGGAGAAGAACTTCACCACCGCCCCCGCCATCT | |
| | GCCACGACGGCAAGGCCCACTTCCCCAGGGAGGGCGTGTTCGTGA | |
| | GCAACGGCACCCACTGGTTCGTGACCCAGAGGAACTTCTACGAGCC | |
| | CCAGATCATCACCACCGACAACACCTTCGTGAGCGGCAACTGCGAC | |
| | GTGGTGATCGGCATCGTGAACAACACCGTGTACGACCCCCTGCAGC | |
| | CCGAGCTGGACAGCTTCAAGGAGGAGCTGGACAAGTACTTCAAGAA | |
| | CCACACCAGCCCCGACGTGGACCTGGGCGACATCAGCGGCATCAAC | |
| | GCCAGCGTGGTGAACATCCAGAAGGAGATCGACAGGCTGAACGAGG | |
| | TGGCCAAGAACCTGAACGAGAGCCTGATCGACCTGCAGGAGCTGGG | |
| | CAAGTACGAGCAGTACATCAAGTGGCCCTGGTACATCTGGCTGGGC | |
| | TTCATCGCCGGCCTGATCGCCATCGTGATGGTGACCATCATGCTGTG | |
| | CTGCATGACCAGCTGCTGCAGCTGCCTGAAGGGCTGCTGCAGCTGC | |
| | GGCAGCTGCTGCAAGTTCGACGAGGACGACAGCGAGCCCGTGCTGA | |
| | AGGGCGTGAAGCTGCACTACACCGGAAGCGGAGCCACGAACTTCTC | |
| | TCTGTTAAAGCAAGCAGGAGATGTTGAAGAAAACCCCGGGCCTATGA | |
| | AGGCAATACTAGTAGTTCTGCTATATACATTTGCAACCGCAAATGCAG | |
| | ACACATTATGTATAGGTTATCATGCGAACAACTCAACAGACACTGTAG | |
| | ACACAGTACTAGAAAAGAATGTAACAGTAACACACTCTGTTAACCTTC | |
| | TAGAAGACAAGCATAACGGGAAACTATGCAAACTAAGAGGGGTAGCC | |
| | CCATTGCATTTGGGTAAATGTAACATTGCTGGCTGGATCCTGGGAAA | |
| | TCCAGAGTGTGAATCACTCTCCACAGCAAGCTCATGGTCCTACATTG | |
| | TGGAAACATCTAGTTCAGACAATGGAACGTGTTACCCAGGAGATTTC | |
| | ATCGATTATGAGGAGCTAAGAGAGCAATTGAGCTCAGTGTCATCATTT | |
| | GAAAGGTTTGAGATATTCCCCAAGACAAGTTCATGGCCCAATCATGA | |
| | CTCGAACAAAGGTGTAACGACAGCATGTCCTCATGCTGGAGCAAAAA | |
| | GCTTCTACAAAAATTTAATATGGCTAGTTAAAAAAGGAAATTCATACC | |
| | CAAAGCTCAGCAAATCCTACATTAATGATAAAGGGAAAGAAGTCCTC | |
| | GTGCTATGGGGCATTCACCATCCACCTACTAGTGCTGACCAACAAAG | |
| | TCTCTATCAGAATGCAGATGCATATGTTTTTGTGGGGACATCAAGATA | |
| | CAGCAAGAAGTTCAAGCCGGAAATAGCAATAAGGCCCAAAGTGAGG | |
| | GATCAAGAAGGGAGAATGAACTATTACTGGACACTAGTAGAGCCGGG | |
| | AGACAAAATAACATTCGAAGCAACTGGAAATCTAGTGGTACCGAGAT | |
| | ATGCATTCGCAATGGAAAGAAATGCTGGATCTGGTATTATCATTTCAG | |
| | ATACACCAGTCCACGATTGCAATACAACTTGTCAGACACCCAAGGGT | |
| | GCTATAAACACCAGCCTCCCATTTCAGAACATACATCCGATCACAATT | |
| | GGAAAATGTCCAAAATATGTAAAAAGCAGAAAATTGAGACTGGCCAC | |
| | AGGATTGAGGAATGTCCCGTCCATTCAATCTAGAGGCCTATTTGGGG | |
| | CCATTGCCGGTTTCATTGAAGGGGGGTGGACAGGGATGGTAGATGG | |
| | ATGGTACGGTTATCACCATCAAAATGAGCAGGGGTCAGGATATGCAG | |
| | CCGACCTGAAGAGCACACAGAATGCCATTGACGAGATTACTAACAAA | |
| | GTAAACTCTGTTATTGAAAAAATGAATACACAGTTCACAGCAGTAGGT | |
| | AAAGAGTTCAACCACCTGGAAAAAAGAATAGAGAATTTAAATAAAAAA | |
| | GTTGATGATGGTTTCCTGGACATTTGGACTTACAATGCCGAACTGTTG | |
| | GTTCTATTGGAAAATGAAAGAACTTTGGACTACCACGATTCAAAGGTG | |
| | AAGAACTTATATGAAAAGGTAAGAAGCCAGTTAAAAAACAATGCCAAG | |
| | GAAATTGGAAACGGCTGCTTTGAATTTTACCACAAATGTGATAACACG | |
| | TGCATGGAAAGTGTCAAAAATGGGACTTATGACTACCCAAAATACTCA | |
| | GAGGAAGCAAAATTAAACAGAGAAGAAATAGATGGGGTAAAGCTGGA | |
| | ATCAACAAGGATTTACCAGATTTTGGCGATCTATTCAACCGTCGCCAG | |
| | TTCATTGGTACTGGTAGTCTCCCTGGGGGCAATCAGTTTCTGGATGT | |
| | GCTCTAATGGGTCTCTACAGTGTAGAATATGTATTTAAGGAAGCGGA | |
| | GCCACGAACTTCTCTCTGTTAAAGCAAGCAGGAGATGTTGAAGAAAA | |
| | CCCCGGGCCTAGCAAAAGCAGGGGATAATTCTATTAACCATGAAGAC | |
| | TATCATTGCTTTGAGCTACATTCTATGTCTGGTTTTCGCTCAAAAACTT | |
| | CCTGGAAATGACAATAGCACTGCAACGCTGTGCCTTGGGCACCATGC | |
| | AGTACCAAACGGAACGATAGTGAAAACAATCACGAATGACCAAATTG | |
| | AAGTTACTAATGCTACTGAGCTGGTTCAGAATTCCTCAATAGGTGAAA | |
| | TATGCGACAGTCCTCATCAGATCCTTGATGGAGAAAACTGCACACTA | |
| | ATAGATGCTCTATTGGGAGACCCTCAGTGTGATGGCTTTCAAAATAA | |
| | GAAATGGGACCTTTTTGTTGAACGAAGCAAAGCCTACAGCAACTGTT | |
| | ACCCTTATGATGTGCCGGATTATGCCTCCCTTAGGTCACTAGTTGCC | |
| | TCATCCGGCACACTGGAGTTTAACAATGAAAGCTTCAATTGGGCTGG | |
| | AGTCACTCAAAACGGAACAAGTTCTGCTTGCATAAGGGGATCTAATA | |
| | GTAGTTTCTTTAGTAGATTAAATTGGTTGACCCACTTAAACTTCAAGTA | |
| | CCCAGCATTGAACGTGACTATGCCAAACAATGAACAATTTGACAAATT | |
| | GTACATTTGGGGGGTTCACCACCCGGGTACGGACAAGGACCAAATC | |
| | TTCCTGTATGCTCAATCATCAGGAAGAATCACAGTATCTACCAAAAGA | |
| | AGCCAACAAGCTGTAATCCCGAATATCGGATCTAGACCCAGAATAAG | |
| | GAATATCCCTAGCAGAATAAGCATCTATTGGACAATAGTAAAACCGG | |
| | GAGACATACTTTGATTAACAGCACAGGGAATCTAATTGCTCCTAGG | |
| | GGTTACTTCAAAATACGAAGTGGGAAAAGCTCAATAATGAGATCAGAT | |
| | GCACCCATTGGCAAATGCAAGTCTGAATGCATCACTCCAAATGGAAG | |
| | CATTCCCAATGACAAACCATTCCAAAATGTAAACAGGATCACATACGG | |
| | GGCCTGTCCCAGATATGTTAAGCAAAGCACTCTGAAATTGGCAACAG | |
| | GAATGCGAAATGTACCAGAGAAACAAACTAGAGGCATATTTGGCGCA | |
| | ATAGCGGGTTTCATAGAAAATGGTTGGGAGGGAATGGTGGATGGTTG | |
| | GTACGGTTTCAGGCATCAAAATTCTGAGGGAAGAGGACAAGCAGCA | |
| | GATCTCAAAAGCACTCAAGCAGCAATCGATCAAATCAATGGGAAGCT | |
| | GAATCGATTGATCGGGAAAACCAACGAGAAATTCCATCAGATTGAGA | |
| | AAGAATTCTCAGAAGTAGAAGGGAGAATTCAGGACCTTGAGAAATAT | |
| | GTTGAGGACACAAAAATAGATCTCTGGTCATACAACGCAGAGCTTCT | |
| | TGTTGCCCTGGAAAACCAACATACAATTGATCTAACTGACTCAGAAAT | |
| | GAACAAACTGTTTGAAAAAACAAAGAAGCAACTGAGGGAAAATGCTG | |
| | AGGATATGGGCAATGGTTGTTTCAAAATATACCACAAATGTGACAATG | |
| | CCTGCATAGGATCAATCAGAAATGGAACTTATGACCACGATGTATACA | |
| | GGGATGAAGCATTAAACAACCGGTTCCAGATCAAGGGAGTTGAGCTG | |
| | AAGTCAGGGTACAAAGATTGGATCCTATGGATTTCCTTTGCCATATCA | |
| | TGTTTTTTGCTTTGTGTTGCTTTGTTGGGGTTCATCATGTGGGCCTGC | |
| | CAAAAGGGCAACATTAGGTGCAACATTTGCATTTGAGTGCATTAATTA | |
| | AAAACACCCTTGTTTCTACTGGAAGCGGAGCCACGAACTTCTCTCTG | |
| | TTAAAGCAAGCAGGAGATGTTGAAGAAAACCCCGGGCCTATTTTCTA | |
| | ATATCCACAAAATGAAGGCAATAATTGTACTACTCATGGTAGTAACAT | |
| | CCAATGCAGATCGAATCTGCACTGGGATAACATCGTCAAACTCACCA | |
| | CATGTCGTCAAAACTGCTACTCAAGGGGAGGTCAACGTGACCGGTGT | |
| | AATACCACTGACAACAACACCCACCAAATCTCATTTTGCAAATCTCAA | |
| | AGGAACAGAAACCAGGGGGAAACTATGCCCAAAATGCCTCAACTGCA | |
| | CAGATCTGGATGTAGCCTTGGGCAGACCAAAATGCACAGGGAAAATA | |
| | CCCTCTGCAAGGGTTTCAATACTCCATGAAGTCAGACCTGTTACATCT | |
| | GGGTGCTTTCCTATAATGCACGATAGAACAAAAATTAGACAGCTGCC | |
| | TAACCTTCTCCGAGGATACGAACATGTCAGGTTATCAACTCACAACGT | |
| | TATCAATGCAAAAGATGCACCAGGAAGACCCTACGAAATTGGAACCT | |
| | CAGGGTCTTGCCCTAACATTACCAATGGAAACGGATTCTTCGCAACA | |
| | ATGGCTTGGGCCGTCCCAAAAAACAAAACAGCAACAAATCCATTAAC | |
| | AATAGAAGTACCATACATTTGTACAGAAGGAGAAGACCAAATTACCGT | |
| | TTGGGGGTTCCACTCTGACAACGAGACCCAAATGGCAAAGCTCTATG | |
| | GGGACTCAAAGCCCCAGAAGTTCACCTCATCTGCCAACGGAGTGAC | |
| | CACACATTACGTTTCACAGATTGGTGGCTTCCCAAATCAAACAGAAGA | |
| | CGGAGGACTACCACAAAGTGGCAGAATTGTTGTTGATTACATGGTGC | |
| | AGAAATCTGGAAAAACAGGAACAATTACCTATCAAAGAGGTATTTTAT | |
| | TGCCTCAAAAAGTGTGGTGCGCAAGTGGCAGGAGCAAGGTAATAAAA | |
| | GGATCCTTGCCCTTAATTGGAGAAGCAGATTGCCTCCATGAAAAATA | |
| | CGGTGGATTAAACAAAAGCAAGCCTTACTACACAGGGGAACATGCAA | |
| | AGGCCATAGGAAATTGCCCAATATGGGTGAAAACACCCTTGAAGCTG | |
| | GCCAATGGAACCAAATATAGACCCCCTGCAAAACTATTAAAGGAAAG | |
| | AGGTTTCTTCGGAGCCATTGCTGGTTTCTTAGAGGGAGGATGGGAAG | |
| | GAATGATTGCAGGTTGGCACGGATACACATCCCATGGGGCACATGG | |
| | AGTAGCGGTGGCAGCTGACCTTAAGAGCACTCAAGAGGCCATAAAC | |
| | AAGATAACAAAAAATCTCAACTCTTTGAGTGAGCTGGAAGTAAAGAAT | |
| | CTTCAAAGACTAAGCGGTGCCATGGATGAACTCCACAACGAAATACT | |
| | AGAACTAGATGAGAAAGTGGATGATCTCAGAGCTGACACAATAAGCT | |
| | CACAAATAGAACTCGCAGTCCTGCTTTCCAATGAAGGAATAATAAACA | |
| | GTGAAGATGAACATCTCTTGGCGCTTGAAAGAAAGCTGAAGAAAATG | |
| | CTGGGCCCCTCTGCTGTAGAGATAGGGAATGGATGCTTTGAAACCAA | |
| | ACACAAGTGCAACCAGACCTGCCTCGACAGAATAGCTGCTGGTACCT | |
| | TTGATGCAGGAGAATTTTCTCTCCCCACCTTTGATTCACTGAATATTA | |
| | CTGCTGCATCTTTAAATGACGACGGATTGGACAATCATACTATACTGC | |
| | TTTACTACTCAACTGCTGCCTCCAGTTTGGCTGTAACACTGATGATAG | |
| | CTATCTTTGTTGTTTATATGGTCTCCAGAGACAATGTTTCTTGCTCCAT | |
| | TTGTCTATAAGGAAAGTTAAGCCCTGTATTTTCCTTTATTGTAGTGCTT | |
| | GTTTGCTTGTTGTCATTACAAAGAAACGTTATTGAAAAATTGATGACT | |
| | CGAGCTGGTACTGCATGCACGCAATGCTAGCTGCCCCTTTCCCGTCC | |
| | TGGGTACCCCGAGTCTCCCCCGACCTCGGGTCCCAGGTATGCTCCC | |
| | ACCTCCACCTGCCCCACTCACCACCTCTGCTAGTTCCAGACACCTCC | |
| | CAAGCACGCAGCAATGCAGCTCAAAACGCTTAGCCTAGCCACACCC | |
| | CCACGGGAAACAGCAGTGATTAACCTTTAGCAATAAACGAAAGTTTAA | |
| | CTAAGCTATACTAACCCCAGGGTTGGTCAATTTCGTGCCAGCCACAC | |
| | CCTGGAGCTAGCAAAAAAAA | |
| Pan-CoV-Flu | CTCGACATTGATTATTGACTAGTTATTAATAGTAATCAATTACGGGGT | 405 |
| Vaccine #17 | CATTAGTTCATAGCCCATATATGGAGTTCCGCGTTACATAACTTACGG | |
| CoV- Omicron | TAAATGGCCCGCCTGGCTGACCGCCCAACGACCCCCGCCCATTGAC | |
| BA.2 | GTCAATAATGACGTATGTTCCCATAGTAACGCCAATAGGGACTTTCCA | |
| Spike(HexaPro)- | TTGACGTCAATGGGTGGAGTATTTACGGTAAACTGCCCACTTGGCAG | |
| Influenza (HA) | TACATCAAGTGTATCATATGCCAAGTACGCCCCCTATTGACGTCAATG | |
| | ACGGTAAATGGCCCGCCTGGCATTATGCCCAGTACATGACCTTATGG | |
| | GACTTTCCTACTTGGCAGTACATCTACGTATTAGTCATCGCTATTACC | |
| | ATGGTCGAGGTGAGCCCCACGTTCTGCTTCACTCTCCCCATCTCCCC | |
| | CCCCTCCCCACCCCCAATTTTGTATTTATTTATTTTTTAATTATTTTGT | |
| | GCAGCGATGGGGGCGGGGGGGGGGGGGGGGCGCGCGCCAGGCG | |
| | GGGCGGGGCGGGGCGAGGGGCGGGGCGGGGCGAGGCGGAGAGG | |
| | TGCGGCGGCAGCCAATCAGAGCGGCGCGCTCCGAAAGTTTCCTTTT | |
| | ATGGCGAGGCGGCGGCGGCGGCGGCCCTATAAAAAGCGAAGCGCG | |
| | CGGCGGGCGGGAGTCGCTGCGCGCTGCCTTCGCCCCGTGCCCCGC | |
| | TCCGCCGCCGCCTCGCGCCGCCCGCCCCGGCTCTGACTGACCGCG | |
| | TTACTCCCACAGGTGAGCGGGCGGGACGGCCCTTCTCCTCCGGGCT | |
| | GTAATTAGCGCTTGGTTTAATGACGGCTTGTTTCTTTTCTGTGGCTGC | |
| | GTGAAAGCCTTGAGGGGCTCCGGGAGGGCCCTTTGTGCGGGGGGA | |
| | GCGGCTCGGGGGGTGCGTGCGTGTGTGTGTGCGTGGGGAGCGCCG | |
| | CGTGCGGCTCCGCGCTGCCCGGCGGCTGTGAGCGCTGCGGGCGCG | |
| | GCGCGGGGCTTTGTGCGCTCCGCAGTGTGCGCGAGGGGAGCGCGG | |
| | CCGGGGGCGGTGCCCCGCGGTGCGGGGGGGGCTGCGAGGGGAAC | |
| | AAAGGCTGCGTGCGGGGTGTGTGCGTGGGGGGGTGAGCAGGGGGT | |
| | GTGGGCGCGTCGGTCGGGCTGCAACCCCCCCTGCACCCCCCTCCC | |
| | CGAGTTGCTGAGCACGGCCCGGCTTCGGGTGCGGGGCTCCGTACG | |
| | GGGCGTGGCGCGGGGCTCGCCGTGCCGGGCGGGGGGTGGCGGCA | |
| | GGTGGGGGTGCCGGGCGGGGCGGGGCCGCCTCGGGCCGGGGAG | |
| | GGCTCGGGGGAGGGGCGCGGCGGCCCCCGGAGCGCCGGCGGCTG | |
| | TCGAGGCGCGGCGAGCCGCAGCCATTGCCTTTTATGGTAATCGTGC | |
| | GAGAGGGCGCAGGGACTTCCTTTGTCCCAAATCTGTGCGGAGCCGA | |
| | AATCTGGGAGGCGCCGCCGCACCCCCTCTAGCGGGCGCGGGGCGA | |
| | AGCGGTGCGGCGCCGGCAGGAAGGAAATGGGCGGGGAGGGCCTTC | |
| | GTGCGTCGCCGCGCCGCCGTCCCCTTCTCCCTCTCCAGCCTCGGGG | |
| | CTGTCCGCGGGGGGACGGCTGCCTTCGGGGGGGACGGGGCAGGG | |
| | CGGGGTTCGGCTTCTGGCGTGTGACCGGCGGCTCTAGAGCCTCTGC | |
| | TAACCATGTTCATGCCTTCTTCTTTTTCCTACAGCTCCTGGGCAACGT | |
| | GCTGGTTATTGTGCTGTCTCATCATTTTGGCAAAGAATTGGAGAATAA | |
| | ACTAGTATTCTTCTGGTCCCCACAGACTCAGAGAGAACCCGCCACCA | |
| | TGTTCGTGTTCCTGGTGCTGCTGCCCCTGGTGAGCAGCCAGTGCGT | |
| | GAACCTGATCACCAGGACCCAGAGCTACACCAACAGCTTCACCAGG | |
| | GGCGTGTACTACCCCGACAAGGTGTTCAGGAGCAGCGTGCTGCACA | |
| | GCACCCAGGACCTGTTCCTGCCCTTCTTCAGCAACGTGACCTGGTTC | |
| | CACGCCATCCACGTGAGCGGCACCAACGGCACCAAGAGGTTCGACA | |
| | ACCCCGTGCTGCCCTTCAACGACGGCGTGTACTTCGCCAGCACCGA | |
| | GAAGAGCAACATCATCAGGGGCTGGATCTTCGGCACCACCCTGGAC | |
| | AGCAAGACCCAGAGCCTGCTGATCGTGAACAACGCCACCAACGTGG | |
| | TGATCAAGGTGTGCGAGTTCCAGTTCTGCAACGACCCCTTCCTGGAC | |
| | GTGTACTACCACAAGAACAACAAGAGCTGGATGGAGAGCGAGTTCA | |
| | GGGTGTACAGCAGCGCCAACAACTGCACCTTCGAGTACGTGAGCCA | |
| | GCCCTTCCTGATGGACCTGGAGGGCAAGCAGGGCAACTTCAAGAAC | |
| | CTGAGGGAGTTCGTGTTCAAGAACATCGACGGCTACTTCAAGATCTA | |
| | CAGCAAGCACACCCCCATCAACCTGGGCAGGGACCTGCCCCAGGGC | |
| | TTCAGCGCCCTGGAGCCCCTGGTGGACCTGCCCATCGGCATCAACA | |
| | TCACCAGGTTCCAGACCCTGCTGGCCCTGCACAGGAGCTACCTGAC | |
| | CCCCGGCGACAGCAGCAGCGGCTGGACCGCCGGCGCCGCCGCCTA | |
| | CTACGTGGGCTACCTGCAGCCCAGGACCTTCCTGCTGAAGTACAAC | |
| | GAGAACGGCACCATCACCGACGCCGTGGACTGCGCCCTGGACCCC | |
| | CTGAGCGAGACCAAGTGCACCCTGAAGAGCTTCACCGTGGAGAAGG | |
| | GCATCTACCAGACCAGCAACTTCAGGGTGCAGCCCACCGAGAGCAT | |
| | CGTGAGGTTCCCCAACATCACCAACCTGTGCCCCTTCGACGAGGTGT | |
| | TCAACGCCACCAGGTTCGCCAGCGTGTACGCCTGGAACAGGAAGAG | |
| | GATCAGCAACTGCGTGGCCGACTACAGCGTGCTGTACAACTTCGCC | |
| | CCCTTCTTCGCCTTCAAGTGCTACGGCGTGAGCCCCACCAAGCTGAA | |
| | CGACCTGTGCTTCACCAACGTGTACGCCGACAGCTTCGTGATCAGG | |
| | GGCAACGAGGTGAGCCAGATCGCCCCCGGCCAGACCGGCAACATC | |
| | GCCGACTACAACTACAAGCTGCCCGACGACTTCACCGGCTGCGTGA | |
| | TCGCCTGGAACAGCAACAAGCTGGACAGCAAGGTGGGCGGCAACTA | |
| | CAACTACCTGTACAGGCTGTTCAGGAAGAGCAACCTGAAGCCCTTCG | |
| | AGAGGGACATCAGCACCGAGATCTACCAGGCCGGCAACAAGCCCTG | |
| | CAACGGCGTGGCCGGCTTCAACTGCTACTTCCCCCTGAGGAGCTAC | |
| | GGCTTCAGGCCCACCTACGGCGTGGGCCACCAGCCCTACAGGGTG | |
| | GTGGTGCTGAGCTTCGAGCTGCTGCACGCCCCCGCCACCGTGTGCG | |
| | GCCCCAAGAAGAGCACCAACCTGGTGAAGAACAAGTGCGTGAACTT | |
| | CAACTTCAACGGCCTGACCGGCACCGGCGTGCTGACCGAGAGCAAC | |
| | AAGAAGTTCCTGCCCTTCCAGCAGTTCGGCAGGGACATCGCCGACA | |
| | CCACCGACGCCGTGAGGGACCCCCAGACCCTGGAGATCCTGGACAT | |
| | CACCCCCTGCAGCTTCGGCGGCGTGAGCGTGATCACCCCCGGCACC | |
| | AACACCAGCAACCAGGTGGCCGTGCTGTACCAGGGCGTGAACTGCA | |
| | CCGAGGTGCCCGTGGCCATCCACGCCGACCAGCTGACCCCCACCTG | |
| | GAGGGTGTACAGCACCGGCAGCAACGTGTTCCAGACCAGGGCCGG | |
| | CTGCCTGATCGGCGCCGAGTACGTGAACAACAGCTACGAGTGCGAC | |
| | ATCCCCATCGGCGCCGGCATCTGCGCCAGCTACCAGACCCAGACCA | |
| | AGAGCCACCAGCAGGCCCAGAGCGTGGCCAGCCAGAGCATCATCG | |
| | CCTACACCATGAGCCTGGGCGCCGAGAACAGCGTGGCCTACAGCAA | |
| | CAACAGCATCGCCATCCCCACCAACTTCACCATCAGCGTGACCACCG | |
| | AGATCCTGCCCGTGAGCATGACCAAGACCAGCGTGGACTGCACCAT | |
| | GTACATCTGCGGCGACAGCACCGAGTGCAGCAACCTGCTGCTGCAG | |
| | TACGGCAGCTTCTGCACCCAGCTGAAGAGGGCCCTGACCGGCATCG | |
| | CCGTGGAGCAGGACAAGAACACCCAGGAGGTGTTCGCCCAGGTGAA | |
| | GCAGATCTACAAGACCCCCCCCATCAAGTACTTCGGCGGCTTCAACT | |
| | TCAGCCAGATCCTGCCCGACCCCAGCAAGCCCAGCAAGAGGAGCCC | |
| | CATCGAGGACCTGCTGTTCAACAAGGTGACCCTGGCCGACGCCGGC | |
| | TTCATCAAGCAGTACGGCGACTGCCTGGGCGACATCGCCGCCAGGG | |
| | ACCTGATCTGCGCCCAGAAGTTCAACGGCCTGACCGTGCTGCCCCC | |
| | CCTGCTGACCGACGAGATGATCGCCCAGTACACCAGCGCCCTGCTG | |
| | GCCGGCACCATCACCAGCGGCTGGACCTTCGGCGCCGGCCCCGCC | |
| | CTGCAGATCCCCTTCCCCATGCAGATGGCCTACAGGTTCAACGGCAT | |
| | CGGCGTGACCCAGAACGTGCTGTACGAGAACCAGAAGCTGATCGCC | |
| | AACCAGTTCAACAGCGCCATCGGCAAGATCCAGGACAGCCTGAGCA | |
| | GCACCCCCAGCGCCCTGGGCAAGCTGCAGGACGTGGTGAACCACAA | |
| | CGCCCAGGCCCTGAACACCCTGGTGAAGCAGCTGAGCAGCAAGTTC | |
| | GGCGCCATCAGCAGCGTGCTGAACGACATCCTGAGCAGGCTGGACC | |
| | CCCCCGAGGCCGAGGTGCAGATCGACAGGCTGATCACCGGCAGGC | |
| | TGCAGAGCCTGCAGACCTACGTGACCCAGCAGCTGATCAGGGCCGC | |
| | CGAGATCAGGGCCAGCGCCAACCTGGCCGCCACCAAGATGAGCGA | |
| | GTGCGTGCTGGGCCAGAGCAAGAGGGTGGACTTCTGCGGCAAGGG | |
| | CTACCACCTGATGAGCTTCCCCCAGAGCGCCCCCCACGGCGTGGTG | |
| | TTCCTGCACGTGACCTACGTGCCCGCCCAGGAGAAGAACTTCACCA | |
| | CCGCCCCCGCCATCTGCCACGACGGCAAGGCCCACTTCCCCAGGGA | |
| | GGGCGTGTTCGTGAGCAACGGCACCCACTGGTTCGTGACCCAGAGG | |
| | AACTTCTACGAGCCCCAGATCATCACCACCGACAACACCTTCGTGAG | |
| | CGGCAACTGCGACGTGGTGATCGGCATCGTGAACAACACCGTGTAC | |
| | GACCCCCTGCAGCCCGAGCTGGACAGCTTCAAGGAGGAGCTGGACA | |
| | AGTACTTCAAGAACCACACCAGCCCCGACGTGGACCTGGGCGACAT | |
| | CAGCGGCATCAACGCCAGCGTGGTGAACATCCAGAAGGAGATCGAC | |
| | AGGCTGAACGAGGTGGCCAAGAACCTGAACGAGAGCCTGATCGACC | |
| | TGCAGGAGCTGGGCAAGTACGAGCAGTACATCAAGTGGCCCTGGTA | |
| | CATCTGGCTGGGCTTCATCGCCGGCCTGATCGCCATCGTGATGGTG | |
| | ACCATCATGCTGTGCTGCATGACCAGCTGCTGCAGCTGCCTGAAGG | |
| | GCTGCTGCAGCTGCGGCAGCTGCTGCAAGTTCGACGAGGACGACAG | |
| | CGAGCCCGTGCTGAAGGGCGTGAAGCTGCACTACACCGGAAGCGG | |
| | AGCCACGAACTTCTCTCTGTTAAAGCAAGCAGGAGATGTTGAAGAAA | |
| | ACCCCGGGCCTATGAAGGCAATACTAGTAGTTCTGCTATATACATTTG | |
| | CAACCGCAAATGCAGACACATTATGTATAGGTTATCATGCGAACAACT | |
| | CAACAGACACTGTAGACACAGTACTAGAAAAGAATGTAACAGTAACA | |
| | CACTCTGTTAACCTTCTAGAAGACAAGCATAACGGGAAACTATGCAAA | |
| | CTAAGAGGGGTAGCCCCATTGCATTTGGGTAAATGTAACATTGCTGG | |
| | CTGGATCCTGGGAAATCCAGAGTGTGAATCACTCTCCACAGCAAGCT | |
| | CATGGTCCTACATTGTGGAAACATCTAGTTCAGACAATGGAACGTGTT | |
| | ACCCAGGAGATTTCATCGATTATGAGGAGCTAAGAGAGCAATTGAGC | |
| | TCAGTGTCATCATTTGAAAGGTTTGAGATATTCCCCAAGACAAGTTCA | |
| | TGGCCCAATCATGACTCGAACAAAGGTGTAACGACAGCATGTCCTCA | |
| | TGCTGGAGCAAAAAGCTTCTACAAAAATTTAATATGGCTAGTTAAAAA | |
| | AGGAAATTCATACCCAAAGCTCAGCAAATCCTACATTAATGATAAAGG | |
| | GAAAGAAGTCCTCGTGCTATGGGGCATTCACCATCCACCTACTAGTG | |
| | CTGACCAACAAAGTCTCTATCAGAATGCAGATGCATATGTTTTTGTGG | |
| | GGACATCAAGATACAGCAAGAAGTTCAAGCCGGAAATAGCAATAAGG | |
| | CCCAAAGTGAGGGATCAAGAAGGGAGAATGAACTATTACTGGACACT | |
| | AGTAGAGCCGGGAGACAAAATAACATTCGAAGCAACTGGAAATCTAG | |
| | TGGTACCGAGATATGCATTCGCAATGGAAAGAAATGCTGGATCTGGT | |
| | ATTATCATTTCAGATACACCAGTCCACGATTGCAATACAACTTGTCAG | |
| | ACACCCAAGGGTGCTATAAACACCAGCCTCCCATTTCAGAACATACA | |
| | TCCGATCACAATTGGAAAATGTCCAAAATATGTAAAAAGCACAAAATT | |
| | GAGACTGGCCACAGGATTGAGGAATGTCCCGTCCATTCAATCTAGAG | |
| | GCCTATTTGGGGCCATTGCCGGTTTCATTGAAGGGGGGTGGACAGG | |
| | GATGGTAGATGGATGGTACGGTTATCACCATCAAAATGAGCAGGGGT | |
| | CAGGATATGCAGCCGACCTGAAGAGCACACAGAATGCCATTGACGA | |
| | GATTACTAACAAAGTAAACTCTGTTATTGAAAAAATGAATACACAGTTC | |
| | ACAGCAGTAGGTAAAGAGTTCAACCACCTGGAAAAAAGAATAGAGAA | |
| | TTTAAATAAAAAAGTTGATGATGGTTTCCTGGACATTTGGACTTACAAT | |
| | GCCGAACTGTTGGTTCTATTGGAAAATGAAAGAACTTTGGACTACCA | |
| | CGATTCAAAGGTGAAGAACTTATATGAAAAGGTAAGAAGCCAGTTAAA | |
| | AAACAATGCCAAGGAAATTGGAAACGGCTGCTTTGAATTTTACCACAA | |
| | ATGTGATAACACGTGCATGGAAAGTGTCAAAAATGGGACTTATGACT | |
| | ACCCAAAATACTCAGAGGAAGCAAAATTAAACAGAGAAGAAATAGAT | |
| | GGGGTAAAGCTGGAATCAACAAGGATTTACCAGATTTTGGCGATCTA | |
| | TTCAACCGTCGCCAGTTCATTGGTACTGGTAGTCTCCCTGGGGGCAA | |
| | TCAGTTTCTGGATGTGCTCTAATGGGTCTCTACAGTGTAGAATATGTA | |
| | TTTAAGGAAGCGGAGCCACGAACTTCTCTCTGTTAAAGCAAGCAGGA | |
| | GATGTTGAAGAAAACCCCGGGCCTAGCAAAAGCAGGGGATAATTCTA | |
| | TTAACCATGAAGACTATCATTGCTTTGAGCTACATTCTATGTCTGGTTT | |
| | TCGCTCAAAAACTTCCTGGAAATGACAATAGCACTGCAACGCTGTGC | |
| | CTTGGGCACCATGCAGTACCAAACGGAACGATAGTGAAAACAATCAC | |
| | GAATGACCAAATTGAAGTTACTAATGCTACTGAGCTGGTTCAGAATTC | |
| | CTCAATAGGTGAAATATGCGACAGTCCTCATCAGATCCTTGATGGAG | |
| | AAAACTGCACACTAATAGATGCTCTATTGGGAGACCCTCAGTGTGAT | |
| | GGCTTTCAAAATAAGAAATGGGACCTTTTTGTTGAACGAAGCAAAGC | |
| | CTACAGCAACTGTTACCCTTATGATGTGCCGGATTATGCCTCCCTTAG | |
| | GTCACTAGTTGCCTCATCCGGCACACTGGAGTTTAACAATGAAAGCT | |
| | TCAATTGGGCTGGAGTCACTCAAAACGGAACAAGTTCTGCTTGCATA | |
| | AGGGGATCTAATAGTAGTTTCTTTAGTAGATTAAATTGGTTGACCCAC | |
| | TTAAACTTCAAGTACCCAGCATTGAACGTGACTATGCCAAACAATGAA | |
| | CAATTTGACAAATTGTACATTTGGGGGGTTCACCACCCGGGTACGGA | |
| | CAAGGACCAAATCTTCCTGTATGCTCAATCATCAGGAAGAATCACAGT | |
| | ATCTACCAAAAGAAGCCAACAAGCTGTAATCCCGAATATCGGATCTA | |
| | GACCCAGAATAAGGAATATCCCTAGCAGAATAAGCATCTATTGGACA | |
| | ATAGTAAAACCGGGAGACATACTTTTGATTAACAGCACAGGGAATCTA | |
| | ATTGCTCCTAGGGGTTACTTCAAAATACGAAGTGGGAAAAGCTCAAT | |
| | AATGAGATCAGATGCACCCATTGGCAAATGCAAGTCTGAATGCATCA | |
| | CTCCAAATGGAAGCATTCCCAATGACAAACCATTCCAAAATGTAAACA | |
| | GGATCACATACGGGGCCTGTCCCAGATATGTTAAGCAAAGCACTCTG | |
| | AAATTGGCAACAGGAATGCGAAATGTACCAGAGAAACAAACTAGAGG | |
| | CATATTTGGCGCAATAGCGGGTTTCATAGAAAATGGTTGGGAGGGAA | |
| | TGGTGGATGGTTGGTACGGTTTCAGGCATCAAAATTCTGAGGGAAGA | |
| | GGACAAGCAGCAGATCTCAAAAGCACTCAAGCAGCAATCGATCAAAT | |
| | CAATGGGAAGCTGAATCGATTGATCGGGAAAACCAACGAGAAATTCC | |
| | ATCAGATTGAGAAAGAATTCTCAGAAGTAGAAGGGAGAATTCAGGAC | |
| | CTTGAGAAATATGTTGAGGACACAAAAATAGATCTCTGGTCATACAAC | |
| | GCAGAGCTTCTTGTTGCCCTGGAAAACCAACATACAATTGATCTAACT | |
| | GACTCAGAAATGAACAAACTGTTTGAAAAAACAAAGAAGCAACTGAG | |
| | GGAAAATGCTGAGGATATGGGCAATGGTTGTTTCAAAATATACCACA | |
| | AATGTGACAATGCCTGCATAGGATCAATCAGAAATGGAACTTATGAC | |
| | CACGATGTATACAGGGATGAAGCATTAAACAACCGGTTCCAGATCAA | |
| | GGGAGTTGAGCTGAAGTCAGGGTACAAAGATTGGATCCTATGGATTT | |
| | CCTTTGCCATATCATGTTTTTTGCTTTGTGTTGCTTTGTTGGGGTTCAT | |
| | CATGTGGGCCTGCCAAAAGGGCAACATTAGGTGCAACATTTGCATTT | |
| | GAGTGCATTAATTAAAAACACCCTTGTTTCTACTGGAAGCGGAGCCA | |
| | CGAACTTCTCTCTGTTAAAGCAAGCAGGAGATGTTGAAGAAAACCCC | |
| | GGGCCTATTTTCTAATATCCACAAAATGAAGGCAATAATTGTACTACT | |
| | CATGGTAGTAACATCCAATGCAGATCGAATCTGCACTGGGATAACAT | |
| | CGTCAAACTCACCACATGTCGTCAAAACTGCTACTCAAGGGGAGGTC | |
| | AACGTGACCGGTGTAATACCACTGACAACAACACCCACCAAATCTCA | |
| | TTTTGCAAATCTCAAAGGAACAGAAACCAGGGGGAAACTATGCCCAA | |
| | AATGCCTCAACTGCACAGATCTGGATGTAGCCTTGGGCAGACCAAAA | |
| | TGCACAGGGAAAATACCCTCTGCAAGGGTTTCAATACTCCATGAAGT | |
| | CAGACCTGTTACATCTGGGTGCTTTCCTATAATGCACGATAGAACAAA | |
| | AATTAGACAGCTGCCTAACCTTCTCCGAGGATACGAACATGTCAGGT | |
| | TATCAACTCACAACGTTATCAATGCAAAAGATGCACCAGGAAGACCC | |
| | TACGAAATTGGAACCTCAGGGTCTTGCCCTAACATTACCAATGGAAA | |
| | CGGATTCTTCGCAACAATGGCTTGGGCCGTCCCAAAAAACAAAACAG | |
| | CAACAAATCCATTAACAATAGAAGTACCATACATTTGTACAGAAGGAG | |
| | AAGACCAAATTACCGTTTGGGGGTTCCACTCTGACAACGAGACCCAA | |
| | ATGGCAAAGCTCTATGGGGACTCAAAGCCCCAGAAGTTCACCTCATC | |
| | TGCCAACGGAGTGACCACACATTACGTTTCACAGATTGGTGGCTTCC | |
| | CAAATCAAACAGAAGACGGAGGACTACCACAAAGTGGCAGAATTGTT | |
| | GTTGATTACATGGTGCAGAAATCTGGAAAAACAGGAACAATTACCTAT | |
| | CAAAGAGGTATTTTATTGCCTCAAAAAGTGTGGTGCGCAAGTGGCAG | |
| | GAGCAAGGTAATAAAAGGATCCTTGCCCTTAATTGGAGAAGCAGATT | |
| | GCCTCCATGAAAAATACGGTGGATTAAACAAAAGCAAGCCTTACTAC | |
| | ACAGGGGAACATGCAAAGGCCATAGGAAATTGCCCAATATGGGTGAA | |
| | AACACCCTTGAAGCTGGCCAATGGAACCAAATATAGACCCCCTGCAA | |
| | AACTATTAAAGGAAAGAGGTTTCTTCGGAGCCATTGCTGGTTTCTTAG | |
| | AGGGAGGATGGGAAGGAATGATTGCAGGTTGGCACGGATACACATC | |
| | CCATGGGGCACATGGAGTAGCGGTGGCAGCTGACCTTAAGAGCACT | |
| | CAAGAGGCCATAAACAAGATAACAAAAAATCTCAACTCTTTGAGTGAG | |
| | CTGGAAGTAAAGAATCTTCAAAGACTAAGCGGTGCCATGGATGAACT | |
| | CCACAACGAAATACTAGAACTAGATGAGAAAGTGGATGATCTCAGAG | |
| | CTGACACAATAAGCTCACAAATAGAACTCGCAGTCCTGCTTTCCAATG | |
| | AAGGAATAATAAACAGTGAAGATGAACATCTCTTGGCGCTTGAAAGA | |
| | AAGCTGAAGAAAATGCTGGGCCCCTCTGCTGTAGAGATAGGGAATG | |
| | GATGCTTTGAAACCAAACACAAGTGCAACCAGACCTGCCTCGACAGA | |
| | ATAGCTGCTGGTACCTTTGATGCAGGAGAATTTTCTCTCCCCACCTTT | |
| | GATTCACTGAATATTACTGCTGCATCTTTAAATGACGACGGATTGGAC | |
| | AATCATACTATACTGCTTTACTACTCAACTGCTGCCTCCAGTTTGGCT | |
| | GTAACACTGATGATAGCTATCTTTGTTGTTTATATGGTCTCCAGAGAC | |
| | AATGTTTCTTGCTCCATTTGTCTATAAGGAAAGTTAAGCCCTGTATTTT | |
| | CCTTTATTGTAGTGCTTGTTTGCTTGTTGTCATTACAAAGAAACGTTAT | |
| | TGAAAAATTGATGACTCGAGCTGGTACTGCATGCACGCAATGCTAGC | |
| | TGCCCCTTTCCCGTCCTGGGTACCCCGAGTCTCCCCCGACCTCGGG | |
| | TCCCAGGTATGCTCCCACCTCCACCTGCCCCACTCACCACCTCTGCT | |
| | AGTTCCAGACACCTCCCAAGCACGCAGCAATGCAGCTCAAAACGCTT | |
| | AGCCTAGCCACACCCCCACGGGAAACAGCAGTGATTAACCTTTAGCA | |
| | ATAAACGAAAGTTTAACTAAGCTATACTAACCCCAGGGTTGGTCAATT | |
| | TCGTGCCAGCCACACCCTGGAGCTAGCAAAAAAAA | |
| Pan-CoV-Flu | CTCGACATTGATTATTGACTAGTTATTAATAGTAATCAATTACGGGGT | 406 |
| Vaccine #18 | CATTAGTTCATAGCCCATATATGGAGTTCCGCGTTACATAACTTACGG | |
| CoV-Omicron | TAAATGGCCCGCCTGGCTGACCGCCCAACGACCCCCGCCCATTGAC | |
| BA.2 Spike(2 | GTCAATAATGACGTATGTTCCCATAGTAACGCCAATAGGGACTTTCCA | |
| proline | TTGACGTCAATGGGTGGAGTATTTACGGTAAACTGCCCACTTGGCAG | |
| substitution)- | TACATCAAGTGTATCATATGCCAAGTACGCCCCCTATTGACGTCAATG | |
| Influenza (HA) | ACGGTAAATGGCCCGCCTGGCATTATGCCCAGTACATGACCTTATGG | |
| | GACTTTCCTACTTGGCAGTACATCTACGTATTAGTCATCGCTATTACC | |
| | ATGGTCGAGGTGAGCCCCACGTTCTGCTTCACTCTCCCCATCTCCCC | |
| | CCCCTCCCCACCCCCAATTTTGTATTTATTTATTTTTTAATTATTTTGT | |
| | GCAGCGATGGGGGCGGGGGGGGGGGGGGGGCGCGCGCCAGGCG | |
| | GGGCGGGGCGGGGCGAGGGGCGGGGCGGGGCGAGGCGGAGAGG | |
| | TGCGGCGGCAGCCAATCAGAGCGGCGCGCTCCGAAAGTTTCCTTTT | |
| | ATGGCGAGGCGGCGGCGGCGGCGGCCCTATAAAAAGCGAAGCGCG | |
| | CGGCGGGCGGGAGTCGCTGCGCGCTGCCTTCGCCCCGTGCCCCGC | |
| | TCCGCCGCCGCCTCGCGCCGCCCGCCCCGGCTCTGACTGACCGCG | |
| | TTACTCCCACAGGTGAGCGGGCGGGACGGCCCTTCTCCTCCGGGCT | |
| | GTAATTAGCGCTTGGTTTAATGACGGCTTGTTTCTTTTCTGTGGCTGC | |
| | GTGAAAGCCTTGAGGGGCTCCGGGAGGGCCCTTTGTGCGGGGGGA | |
| | GCGGCTCGGGGGGTGCGTGCGTGTGTGTGTGCGTGGGGAGCGCCG | |
| | CGTGCGGCTCCGCGCTGCCCGGCGGCTGTGAGCGCTGCGGGCGCG | |
| | GCGCGGGGCTTTGTGCGCTCCGCAGTGTGCGCGAGGGGAGCGCGG | |
| | CCGGGGGCGGTGCCCCGCGGTGCGGGGGGGGCTGCGAGGGGAAC | |
| | AAAGGCTGCGTGCGGGGTGTGTGCGTGGGGGGGTGAGCAGGGGGT | |
| | GTGGGCGCGTCGGTCGGGCTGCAACCCCCCCTGCACCCCCCTCCC | |
| | CGAGTTGCTGAGCACGGCCCGGCTTCGGGTGCGGGGCTCCGTACG | |
| | GGGCGTGGCGCGGGGCTCGCCGTGCCGGGCGGGGGGTGGCGGCA | |
| | GGTGGGGGTGCCGGGCGGGGCGGGGCCGCCTCGGGCCGGGGAG | |
| | GGCTCGGGGGAGGGGCGCGGCGGCCCCCGGAGCGCCGGCGGCTG | |
| | TCGAGGCGCGGCGAGCCGCAGCCATTGCCTTTTATGGTAATCGTGC | |
| | GAGAGGGCGCAGGGACTTCCTTTGTCCCAAATCTGTGCGGAGCCGA | |
| | AATCTGGGAGGCGCCGCCGCACCCCCTCTAGCGGGCGCGGGGCGA | |
| | AGCGGTGCGGCGCCGGCAGGAAGGAAATGGGCGGGGAGGGCCTTC | |
| | GTGCGTCGCCGCGCCGCCGTCCCCTTCTCCCTCTCCAGCCTCGGGG | |
| | CTGTCCGCGGGGGGACGGCTGCCTTCGGGGGGGACGGGGCAGGG | |
| | CGGGGTTCGGCTTCTGGCGTGTGACCGGCGGCTCTAGAGCCTCTGC | |
| | TAACCATGTTCATGCCTTCTTCTTTTTCCTACAGCTCCTGGGCAACGT | |
| | GCTGGTTATTGTGCTGTCTCATCATTTTGGCAAAGAATTGGAGAATAA | |
| | ACTAGTATTCTTCTGGTCCCCACAGACTCAGAGAGAACCCGCCACCA | |
| | TGTTCGTGTTCCTGGTGCTGCTGCCCCTGGTGAGCAGCCAGTGCGT | |
| | GAACCTGATCACCAGGACCCAGAGCTACACCAACAGCTTCACCAGG | |
| | GGCGTGTACTACCCCGACAAGGTGTTCAGGAGCAGCGTGCTGCACA | |
| | GCACCCAGGACCTGTTCCTGCCCTTCTTCAGCAACGTGACCTGGTTC | |
| | CACGCCATCCACGTGAGCGGCACCAACGGCACCAAGAGGTTCGACA | |
| | ACCCCGTGCTGCCCTTCAACGACGGCGTGTACTTCGCCAGCACCGA | |
| | GAAGAGCAACATCATCAGGGGCTGGATCTTCGGCACCACCCTGGAC | |
| | AGCAAGACCCAGAGCCTGCTGATCGTGAACAACGCCACCAACGTGG | |
| | TGATCAAGGTGTGCGAGTTCCAGTTCTGCAACGACCCCTTCCTGGAC | |
| | GTGTACTACCACAAGAACAACAAGAGCTGGATGGAGAGCGAGTTCA | |
| | GGGTGTACAGCAGCGCCAACAACTGCACCTTCGAGTACGTGAGCCA | |
| | GCCCTTCCTGATGGACCTGGAGGGCAAGCAGGGCAACTTCAAGAAC | |
| | CTGAGGGAGTTCGTGTTCAAGAACATCGACGGCTACTTCAAGATCTA | |
| | CAGCAAGCACACCCCCATCAACCTGGGCAGGGACCTGCCCCAGGGC | |
| | TTCAGCGCCCTGGAGCCCCTGGTGGACCTGCCCATCGGCATCAACA | |
| | TCACCAGGTTCCAGACCCTGCTGGCCCTGCACAGGAGCTACCTGAC | |
| | CCCCGGCGACAGCAGCAGCGGCTGGACCGCCGGCGCCGCCGCCTA | |
| | CTACGTGGGCTACCTGCAGCCCAGGACCTTCCTGCTGAAGTACAAC | |
| | GAGAACGGCACCATCACCGACGCCGTGGACTGCGCCCTGGACCCC | |
| | CTGAGCGAGACCAAGTGCACCCTGAAGAGCTTCACCGTGGAGAAGG | |
| | GCATCTACCAGACCAGCAACTTCAGGGTGCAGCCCACCGAGAGCAT | |
| | CGTGAGGTTCCCCAACATCACCAACCTGTGCCCCTTCGACGAGGTGT | |
| | TCAACGCCACCAGGTTCGCCAGCGTGTACGCCTGGAACAGGAAGAG | |
| | GATCAGCAACTGCGTGGCCGACTACAGCGTGCTGTACAACTTCGCC | |
| | CCCTTCTTCGCCTTCAAGTGCTACGGCGTGAGCCCCACCAAGCTGAA | |
| | CGACCTGTGCTTCACCAACGTGTACGCCGACAGCTTCGTGATCAGG | |
| | GGCAACGAGGTGAGCCAGATCGCCCCCGGCCAGACCGGCAACATC | |
| | GCCGACTACAACTACAAGCTGCCCGACGACTTCACCGGCTGCGTGA | |
| | TCGCCTGGAACAGCAACAAGCTGGACAGCAAGGTGGGCGGCAACTA | |
| | CAACTACCTGTACAGGCTGTTCAGGAAGAGCAACCTGAAGCCCTTCG | |
| | AGAGGGACATCAGCACCGAGATCTACCAGGCCGGCAACAAGCCCTG | |
| | CAACGGCGTGGCCGGCTTCAACTGCTACTTCCCCCTGAGGAGCTAC | |
| | GGCTTCAGGCCCACCTACGGCGTGGGCCACCAGCCCTACAGGGTG | |
| | GTGGTGCTGAGCTTCGAGCTGCTGCACGCCCCCGCCACCGTGTGCG | |
| | GCCCCAAGAAGAGCACCAACCTGGTGAAGAACAAGTGCGTGAACTT | |
| | CAACTTCAACGGCCTGACCGGCACCGGCGTGCTGACCGAGAGCAAC | |
| | AAGAAGTTCCTGCCCTTCCAGCAGTTCGGCAGGGACATCGCCGACA | |
| | CCACCGACGCCGTGAGGGACCCCCAGACCCTGGAGATCCTGGACAT | |
| | CACCCCCTGCAGCTTCGGCGGCGTGAGCGTGATCACCCCCGGCACC | |
| | AACACCAGCAACCAGGTGGCCGTGCTGTACCAGGGCGTGAACTGCA | |
| | CCGAGGTGCCCGTGGCCATCCACGCCGACCAGCTGACCCCCACCTG | |
| | GAGGGTGTACAGCACCGGCAGCAACGTGTTCCAGACCAGGGCCGG | |
| | CTGCCTGATCGGCGCCGAGTACGTGAACAACAGCTACGAGTGCGAC | |
| | ATCCCCATCGGCGCCGGCATCTGCGCCAGCTACCAGACCCAGACCA | |
| | AGAGCCACCAGCAGGCCCAGAGCGTGGCCAGCCAGAGCATCATCG | |
| | CCTACACCATGAGCCTGGGCGCCGAGAACAGCGTGGCCTACAGCAA | |
| | CAACAGCATCGCCATCCCCACCAACTTCACCATCAGCGTGACCACCG | |
| | AGATCCTGCCCGTGAGCATGACCAAGACCAGCGTGGACTGCACCAT | |
| | GTACATCTGCGGCGACAGCACCGAGTGCAGCAACCTGCTGCTGCAG | |
| | TACGGCAGCTTCTGCACCCAGCTGAAGAGGGCCCTGACCGGCATCG | |
| | CCGTGGAGCAGGACAAGAACACCCAGGAGGTGTTCGCCCAGGTGAA | |
| | GCAGATCTACAAGACCCCCCCCATCAAGTACTTCGGCGGCTTCAACT | |
| | TCAGCCAGATCCTGCCCGACCCCAGCAAGCCCAGCAAGAGGAGCTT | |
| | CATCGAGGACCTGCTGTTCAACAAGGTGACCCTGGCCGACGCCGGC | |
| | TTCATCAAGCAGTACGGCGACTGCCTGGGCGACATCGCCGCCAGGG | |
| | ACCTGATCTGCGCCCAGAAGTTCAACGGCCTGACCGTGCTGCCCCC | |
| | CCTGCTGACCGACGAGATGATCGCCCAGTACACCAGCGCCCTGCTG | |
| | GCCGGCACCATCACCAGCGGCTGGACCTTCGGCGCCGGCGCCGCC | |
| | CTGCAGATCCCCTTCGCCATGCAGATGGCCTACAGGTTCAACGGCAT | |
| | CGGCGTGACCCAGAACGTGCTGTACGAGAACCAGAAGCTGATCGCC | |
| | AACCAGTTCAACAGCGCCATCGGCAAGATCCAGGACAGCCTGAGCA | |
| | GCACCGCCAGCGCCCTGGGCAAGCTGCAGGACGTGGTGAACCACA | |
| | ACGCCCAGGCCCTGAACACCCTGGTGAAGCAGCTGAGCAGCAAGTT | |
| | CGGCGCCATCAGCAGCGTGCTGAACGACATCCTGAGCAGGCTGGAC | |
| | CCCCCCGAGGCCGAGGTGCAGATCGACAGGCTGATCACCGGCAGG | |
| | CTGCAGAGCCTGCAGACCTACGTGACCCAGCAGCTGATCAGGGCCG | |
| | CCGAGATCAGGGCCAGCGCCAACCTGGCCGCCACCAAGATGAGCG | |
| | AGTGCGTGCTGGGCCAGAGCAAGAGGGTGGACTTCTGCGGCAAGG | |
| | GCTACCACCTGATGAGCTTCCCCCAGAGCGCCCCCCACGGCGTGGT | |
| | GTTCCTGCACGTGACCTACGTGCCCGCCCAGGAGAAGAACTTCACC | |
| | ACCGCCCCCGCCATCTGCCACGACGGCAAGGCCCACTTCCCCAGGG | |
| | AGGGCGTGTTCGTGAGCAACGGCACCCACTGGTTCGTGACCCAGAG | |
| | GAACTTCTACGAGCCCCAGATCATCACCACCGACAACACCTTCGTGA | |
| | GCGGCAACTGCGACGTGGTGATCGGCATCGTGAACAACACCGTGTA | |
| | CGACCCCCTGCAGCCCGAGCTGGACAGCTTCAAGGAGGAGCTGGAC | |
| | AAGTACTTCAAGAACCACACCAGCCCCGACGTGGACCTGGGCGACA | |
| | TCAGCGGCATCAACGCCAGCGTGGTGAACATCCAGAAGGAGATCGA | |
| | CAGGCTGAACGAGGTGGCCAAGAACCTGAACGAGAGCCTGATCGAC | |
| | CTGCAGGAGCTGGGCAAGTACGAGCAGTACATCAAGTGGCCCTGGT | |
| | ACATCTGGCTGGGCTTCATCGCCGGCCTGATCGCCATCGTGATGGT | |
| | GACCATCATGCTGTGCTGCATGACCAGCTGCTGCAGCTGCCTGAAG | |
| | GGCTGCTGCAGCTGCGGCAGCTGCTGCAAGTTCGACGAGGACGACA | |
| | GCGAGCCCGTGCTGAAGGGCGTGAAGCTGCACTACACCGGAAGCG | |
| | GAGCCACGAACTTCTCTCTGTTAAAGCAAGCAGGAGATGTTGAAGAA | |
| | AACCCCGGGCCTATGAAGGCAATACTAGTAGTTCTGCTATATACATTT | |
| | GCAACCGCAAATGCAGACACATTATGTATAGGTTATCATGCGAACAA | |
| | CTCAACAGACACTGTAGACACAGTACTAGAAAAGAATGTAACAGTAA | |
| | CACACTCTGTTAACCTTCTAGAAGACAAGCATAACGGGAAACTATGC | |
| | AAACTAAGAGGGGTAGCCCCATTGCATTTGGGTAAATGTAACATTGC | |
| | TGGCTGGATCCTGGGAAATCCAGAGTGTGAATCACTCTCCACAGCAA | |
| | GCTCATGGTCCTACATTGTGGAAACATCTAGTTCAGACAATGGAACG | |
| | TGTTACCCAGGAGATTTCATCGATTATGAGGAGCTAAGAGAGCAATT | |
| | GAGCTCAGTGTCATCATTTGAAAGGTTTGAGATATTCCCCAAGACAA | |
| | GTTCATGGCCCAATCATGACTCGAACAAAGGTGTAACGACAGCATGT | |
| | CCTCATGCTGGAGCAAAAAGCTTCTACAAAAATTTAATATGGCTAGTT | |
| | AAAAAAGGAAATTCATACCCAAAGCTCAGCAAATCCTACATTAATGAT | |
| | AAAGGGAAAGAAGTCCTCGTGCTATGGGGCATTCACCATCCACCTAC | |
| | TAGTGCTGACCAACAAAGTCTCTATCAGAATGCAGATGCATATGTTTT | |
| | TGTGGGGACATCAAGATACAGCAAGAAGTTCAAGCCGGAAATAGCAA | |
| | TAAGGCCCAAAGTGAGGGATCAAGAAGGGAGAATGAACTATTACTGG | |
| | ACACTAGTAGAGCCGGGAGACAAAATAACATTCGAAGCAACTGGAAA | |
| | TCTAGTGGTACCGAGATATGCATTCGCAATGGAAAGAAATGCTGGAT | |
| | CTGGTATTATCATTTCAGATACACCAGTCCACGATTGCAATACAACTT | |
| | GTCAGACACCCAAGGGTGCTATAAACACCAGCCTCCCATTTCAGAAC | |
| | ATACATCCGATCACAATTGGAAAATGTCCAAAATATGTAAAAAGCACA | |
| | AAATTGAGACTGGCCACAGGATTGAGGAATGTCCCGTCCATTCAATC | |
| | TAGAGGCCTATTTGGGGCCATTGCCGGTTTCATTGAAGGGGGGTGG | |
| | ACAGGGATGGTAGATGGATGGTACGGTTATCACCATCAAAATGAGCA | |
| | GGGGTCAGGATATGCAGCCGACCTGAAGAGCACACAGAATGCCATT | |
| | GACGAGATTACTAACAAAGTAAACTCTGTTATTGAAAAAATGAATACA | |
| | CAGTTCACAGCAGTAGGTAAAGAGTTCAACCACCTGGAAAAAAGAAT | |
| | AGAGAATTTAAATAAAAAAGTTGATGATGGTTTCCTGGACATTTGGAC | |
| | TTACAATGCCGAACTGTTGGTTCTATTGGAAAATGAAAGAACTTTGGA | |
| | CTACCACGATTCAAAGGTGAAGAACTTATATGAAAAGGTAAGAAGCC | |
| | AGTTAAAAAACAATGCCAAGGAAATTGGAAACGGCTGCTTTGAATTTT | |
| | ACCACAAATGTGATAACACGTGCATGGAAAGTGTCAAAAATGGGACT | |
| | TATGACTACCCAAAATACTCAGAGGAAGCAAAATTAAACAGAGAAGAA | |
| | ATAGATGGGGTAAAGCTGGAATCAACAAGGATTTACCAGATTTTGGC | |
| | GATCTATTCAACCGTCGCCAGTTCATTGGTACTGGTAGTCTCCCTGG | |
| | GGGCAATCAGTTTCTGGATGTGCTCTAATGGGTCTCTACAGTGTAGA | |
| | ATATGTATTTAAGGAAGCGGAGCCACGAACTTCTCTCTGTTAAAGCAA | |
| | GCAGGAGATGTTGAAGAAAACCCCGGGCCTAGCAAAAGCAGGGGAT | |
| | AATTCTATTAACCATGAAGACTATCATTGCTTTGAGCTACATTCTATGT | |
| | CTGGTTTTCGCTCAAAAACTTCCTGGAAATGACAATAGCACTGCAAC | |
| | GCTGTGCCTTGGGCACCATGCAGTACCAAACGGAACGATAGTGAAAA | |
| | CAATCACGAATGACCAAATTGAAGTTACTAATGCTACTGAGCTGGTTC | |
| | AGAATTCCTCAATAGGTGAAATATGCGACAGTCCTCATCAGATCCTTG | |
| | ATGGAGAAAACTGCACACTAATAGATGCTCTATTGGGAGACCCTCAG | |
| | TGTGATGGCTTTCAAAATAAGAAATGGGACCTTTTTGTTGAACGAAGC | |
| | AAAGCCTACAGCAACTGTTACCCTTATGATGTGCCGGATTATGCCTC | |
| | CCTTAGGTCACTAGTTGCCTCATCCGGCACACTGGAGTTTAACAATG | |
| | AAAGCTTCAATTGGGCTGGAGTCACTCAAAACGGAACAAGTTCTGCT | |
| | TGCATAAGGGGATCTAATAGTAGTTTCTTTAGTAGATTAAATTGGTTG | |
| | ACCCACTTAAACTTCAAGTACCCAGCATTGAACGTGACTATGCCAAAC | |
| | AATGAACAATTTGACAAATTGTACATTTGGGGGGTTCACCACCCGGG | |
| | TACGGACAAGGACCAAATCTTCCTGTATGCTCAATCATCAGGAAGAA | |
| | TCACAGTATCTACCAAAAGAAGCCAACAAGCTGTAATCCCGAATATC | |
| | GGATCTAGACCCAGAATAAGGAATATCCCTAGCAGAATAAGCATCTA | |
| | TTGGACAATAGTAAAACCGGGAGACATACTTTTGATTAACAGCACAG | |
| | GGAATCTAATTGCTCCTAGGGGTTACTTCAAAATACGAAGTGGGAAA | |
| | AGCTCAATAATGAGATCAGATGCACCCATTGGCAAATGCAAGTCTGA | |
| | ATGCATCACTCCAAATGGAAGCATTCCCAATGACAAACCATTCCAAAA | |
| | TGTAAACAGGATCACATACGGGGCCTGTCCCAGATATGTTAAGCAAA | |
| | GCACTCTGAAATTGGCAACAGGAATGCGAAATGTACCAGAGAAACAA | |
| | ACTAGAGGCATATTTGGCGCAATAGCGGGTTTCATAGAAAATGGTTG | |
| | GGAGGGAATGGTGGATGGTTGGTACGGTTTCAGGCATCAAAATTCTG | |
| | AGGGAAGAGGACAAGCAGCAGATCTCAAAAGCACTCAAGCAGCAAT | |
| | CGATCAAATCAATGGGAAGCTGAATCGATTGATCGGGAAAACCAACG | |
| | AGAAATTCCATCAGATTGAGAAAGAATTCTCAGAAGTAGAAGGGAGA | |
| | ATTCAGGACCTTGAGAAATATGTTGAGGACACAAAAATAGATCTCTGG | |
| | TCATACAACGCAGAGCTTCTTGTTGCCCTGGAAAACCAACATACAATT | |
| | GATCTAACTGACTCAGAAATGAACAAACTGTTTGAAAAAACAAAGAAG | |
| | CAACTGAGGGAAAATGCTGAGGATATGGGCAATGGTTGTTTCAAAAT | |
| | ATACCACAAATGTGACAATGCCTGCATAGGATCAATCAGAAATGGAA | |
| | CTTATGACCACGATGTATACAGGGATGAAGCATTAAACAACCGGTTC | |
| | CAGATCAAGGGAGTTGAGCTGAAGTCAGGGTACAAAGATTGGATCCT | |
| | ATGGATTTCCTTTGCCATATCATGTTTTTTGCTTTGTGTTGCTTTGTTG | |
| | GGGTTCATCATGTGGGCCTGCCAAAAGGGCAACATTAGGTGCAACAT | |
| | TTGCATTTGAGTGCATTAATTAAAAACACCCTTGTTTCTACTGGAAGC | |
| | GGAGCCACGAACTTCTCTCTGTTAAAGCAAGCAGGAGATGTTGAAGA | |
| | AAACCCCGGGCCTATTTTCTAATATCCACAAAATGAAGGCAATAATTG | |
| | TACTACTCATGGTAGTAACATCCAATGCAGATCGAATCTGCACTGGG | |
| | ATAACATCGTCAAACTCACCACATGTCGTCAAAACTGCTACTCAAGG | |
| | GGAGGTCAACGTGACCGGTGTAATACCACTGACAACAACACCCACCA | |
| | AATCTCATTTTGCAAATCTCAAAGGAACAGAAACCAGGGGGAAACTAT | |
| | GCCCAAAATGCCTCAACTGCACAGATCTGGATGTAGCCTTGGGCAGA | |
| | CCAAAATGCACAGGGAAAATACCCTCTGCAAGGGTTTCAATACTCCA | |
| | TGAAGTCAGACCTGTTACATCTGGGTGCTTTCCTATAATGCACGATAG | |
| | AACAAAAATTAGACAGCTGCCTAACCTTCTCCGAGGATACGAACATG | |
| | TCAGGTTATCAACTCACAACGTTATCAATGCAAAAGATGCACCAGGAA | |
| | GACCCTACGAAATTGGAACCTCAGGGTCTTGCCCTAACATTACCAAT | |
| | GGAAACGGATTCTTCGCAACAATGGCTTGGGCCGTCCCAAAAAACAA | |
| | AACAGCAACAAATCCATTAACAATAGAAGTACCATACATTTGTACAGA | |
| | AGGAGAAGACCAAATTACCGTTTGGGGGTTCCACTCTGACAACGAGA | |
| | CCCAAATGGCAAAGCTCTATGGGGACTCAAAGCCCCAGAAGTTCACC | |
| | TCATCTGCCAACGGAGTGACCACACATTACGTTTCACAGATTGGTGG | |
| | CTTCCCAAATCAAACAGAAGACGGAGGACTACCACAAAGTGGCAGAA | |
| | TTGTTGTTGATTACATGGTGCAGAAATCTGGAAAAACAGGAACAATTA | |
| | CCTATCAAAGAGGTATTTTATTGCCTCAAAAAGTGTGGTGCGCAAGT | |
| | GGCAGGAGCAAGGTAATAAAAGGATCCTTGCCCTTAATTGGAGAAGC | |
| | AGATTGCCTCCATGAAAAATACGGTGGATTAAACAAAAGCAAGCCTTA | |
| | CTACACAGGGGAACATGCAAAGGCCATAGGAAATTGCCCAATATGGG | |
| | TGAAAACACCCTTGAAGCTGGCCAATGGAACCAAATATAGACCCCCT | |
| | GCAAAACTATTAAAGGAAAGAGGTTTCTTCGGAGCCATTGCTGGTTT | |
| | CTTAGAGGGAGGATGGGAAGGAATGATTGCAGGTTGGCACGGATAC | |
| | ACATCCCATGGGGCACATGGAGTAGCGGTGGCAGCTGACCTTAAGA | |
| | GCACTCAAGAGGCCATAAACAAGATAACAAAAAATCTCAACTCTTTGA | |
| | GTGAGCTGGAAGTAAAGAATCTTCAAAGACTAAGCGGTGCCATGGAT | |
| | GAACTCCACAACGAAATACTAGAACTAGATGAGAAAGTGGATGATCT | |
| | CAGAGCTGACACAATAAGCTCACAAATAGAACTCGCAGTCCTGCTTT | |
| | CCAATGAAGGAATAATAAACAGTGAAGATGAACATCTCTTGGCGCTT | |
| | GAAAGAAAGCTGAAGAAAATGCTGGGCCCCTCTGCTGTAGAGATAG | |
| | GGAATGGATGCTTTGAAACCAAACACAAGTGCAACCAGACCTGCCTC | |
| | GACAGAATAGCTGCTGGTACCTTTGATGCAGGAGAATTTTCTCTCCC | |
| | CACCTTTGATTCACTGAATATTACTGCTGCATCTTTAAATGACGACGG | |
| | ATTGGACAATCATACTATACTGCTTTACTACTCAACTGCTGCCTCCAG | |
| | TTTGGCTGTAACACTGATGATAGCTATCTTTGTTGTTTATATGGTCTC | |
| | CAGAGACAATGTTTCTTGCTCCATTTGTCTATAAGGAAAGTTAAGCCC | |
| | TGTATTTTCCTTTATTGTAGTGCTTGTTTGCTTGTTGTCATTACAAAGA | |
| | AACGTTATTGAAAAATTGATGACTCGAGCTGGTACTGCATGCACGCA | |
| | ATGCTAGCTGCCCCTTTCCCGTCCTGGGTACCCCGAGTCTCCCCCG | |
| | ACCTCGGGTCCCAGGTATGCTCCCACCTCCACCTGCCCCACTCACC | |
| | ACCTCTGCTAGTTCCAGACACCTCCCAAGCACGCAGCAATGCAGCTC | |
| | AAAACGCTTAGCCTAGCCACACCCCCACGGGAAACAGCAGTGATTAA | |
| | CCTTTAGCAATAAACGAAAGTTTAACTAAGCTATACTAACCCCAGGGT | |
| | TGGTCAATTTCGTGCCAGCCACACCCTGGAGCTAGCAAAAAAAA | |
| Pan-CoV-Flu | TAGTTATTAATAGTAATCAATTACGGGGTCATTAGTTCATAGCCCATAT | 407 |
| Vaccine #19 | ATGGAGTTCCGCGTTACATAACTTACGGTAAATGGCCCGCCTGGCTG | |
| CoV-Wuhan | ACCGCCCAACGACCCCCGCCCATTGACGTCAATAATGACGTATGTTC | |
| Spike(HexaPro)- | CCATAGTAACGCCAATAGGGACTTTCCATTGACGTCAATGGGTGGAG | |
| influenza (HA) | TATTTACGGTAAACTGCCCACTTGGCAGTACATCAAGTGTATCATATG | |
| | CCAAGTACGCCCCCTATTGACGTCAATGACGGTAAATGGCCCGCCTG | |
| | GCATTATGCCCAGTACATGACCTTATGGGACTTTCCTACTTGGCAGTA | |
| | CATCTACGTATTAGTCATCGCTATTACCATGGTGATGCGGTTTTGGCA | |
| | GTACATCAATGGGCGTGGATAGCGGTTTGACTCACGGGGATTTCCAA | |
| | GTCTCCACCCCATTGACGTCAATGGGAGTTTGTTTTGGCACCAAAAT | |
| | CAACGGGACTTTCCAAAATGTCGTAACAACTCCGCCCCATTGACGCA | |
| | AATGGGCGGTAGGCGTGTACGGTGGGAGGTCTATATAAGCAGAGCT | |
| | GGTTTAGTGAACCGTCAGATCGAGAATAAACTAGTATTCTTCTGGTCC | |
| | CCACAGACTCAGAGAGAACCCGCCACCATGTTCGTGTTCCTGGTGCT | |
| | GCTGCCCCTGGTGAGCAGCCAGTGCGTGAACCTGACCACCAGGACC | |
| | CAGCTGCCCCCCGCCTACACCAACAGCTTCACCAGGGGCGTGTACT | |
| | ACCCCGACAAGGTGTTCAGGAGCAGCGTGCTGCACAGCACCCAGGA | |
| | CCTGTTCCTGCCCTTCTTCAGCAACGTGACCTGGTTCCACGCCATCC | |
| | ACGTGAGCGGCACCAACGGCACCAAGAGGTTCGACAACCCCGTGCT | |
| | GCCCTTCAACGACGGCGTGTACTTCGCCAGCACCGAGAAGAGCAAC | |
| | ATCATCAGGGGCTGGATCTTCGGCACCACCCTGGACAGCAAGACCC | |
| | AGAGCCTGCTGATCGTGAACAACGCCACCAACGTGGTGATCAAGGT | |
| | GTGCGAGTTCCAGTTCTGCAACGACCCCTTCCTGGGCGTGTACTACC | |
| | ACAAGAACAACAAGAGCTGGATGGAGAGCGAGTTCAGGGTGTACAG | |
| | CAGCGCCAACAACTGCACCTTCGAGTACGTGAGCCAGCCCTTCCTG | |
| | ATGGACCTGGAGGGCAAGCAGGGCAACTTCAAGAACCTGAGGGAGT | |
| | TCGTGTTCAAGAACATCGACGGCTACTTCAAGATCTACAGCAAGCAC | |
| | ACCCCCATCAACCTGGTGAGGGACCTGCCCCAGGGCTTCAGCGCCC | |
| | TGGAGCCCCTGGTGGACCTGCCCATCGGCATCAACATCACCAGGTT | |
| | CCAGACCCTGCTGGCCCTGCACAGGAGCTACCTGACCCCCGGCGAC | |
| | AGCAGCAGCGGCTGGACCGCCGGCGCCGCCGCCTACTACGTGGGC | |
| | TACCTGCAGCCCAGGACCTTCCTGCTGAAGTACAACGAGAACGGCA | |
| | CCATCACCGACGCCGTGGACTGCGCCCTGGACCCCCTGAGCGAGAC | |
| | CAAGTGCACCCTGAAGAGCTTCACCGTGGAGAAGGGCATCTACCAG | |
| | ACCAGCAACTTCAGGGTGCAGCCCACCGAGAGCATCGTGAGGTTCC | |
| | CCAACATCACCAACCTGTGCCCCTTCGGCGAGGTGTTCAACGCCAC | |
| | CAGGTTCGCCAGCGTGTACGCCTGGAACAGGAAGAGGATCAGCAAC | |
| | TGCGTGGCCGACTACAGCGTGCTGTACAACAGCGCCAGCTTCAGCA | |
| | CCTTCAAGTGCTACGGCGTGAGCCCCACCAAGCTGAACGACCTGTG | |
| | CTTCACCAACGTGTACGCCGACAGCTTCGTGATCAGGGGCGACGAG | |
| | GTGAGGCAGATCGCCCCCGGCCAGACCGGCAAGATCGCCGACTACA | |
| | ACTACAAGCTGCCCGACGACTTCACCGGCTGCGTGATCGCCTGGAA | |
| | CAGCAACAACCTGGACAGCAAGGTGGGCGGCAACTACAACTACCTG | |
| | TACAGGCTGTTCAGGAAGAGCAACCTGAAGCCCTTCGAGAGGGACA | |
| | TCAGCACCGAGATCTACCAGGCCGGCAGCACCCCCTGCAACGGCGT | |
| | GGAGGGCTTCAACTGCTACTTCCCCCTGCAGAGCTACGGCTTCCAG | |
| | CCCACCAACGGCGTGGGCTACCAGCCCTACAGGGTGGTGGTGCTGA | |
| | GCTTCGAGCTGCTGCACGCCCCCGCCACCGTGTGCGGCCCCAAGAA | |
| | GAGCACCAACCTGGTGAAGAACAAGTGCGTGAACTTCAACTTCAACG | |
| | GCCTGACCGGCACCGGCGTGCTGACCGAGAGCAACAAGAAGTTCCT | |
| | GCCCTTCCAGCAGTTCGGCAGGGACATCGCCGACACCACCGACGCC | |
| | GTGAGGGACCCCCAGACCCTGGAGATCCTGGACATCACCCCCTGCA | |
| | GCTTCGGCGGCGTGAGCGTGATCACCCCCGGCACCAACACCAGCAA | |
| | CCAGGTGGCCGTGCTGTACCAGGACGTGAACTGCACCGAGGTGCCC | |
| | GTGGCCATCCACGCCGACCAGCTGACCCCCACCTGGAGGGTGTACA | |
| | GCACCGGCAGCAACGTGTTCCAGACCAGGGCCGGCTGCCTGATCG | |
| | GCGCCGAGCACGTGAACAACAGCTACGAGTGCGACATCCCCATCGG | |
| | CGCCGGCATCTGCGCCAGCTACCAGACCCAGACCAACAGCCCCGGC | |
| | AGCGCCAGCAGCGTGGCCAGCCAGAGCATCATCGCCTACACCATGA | |
| | GCCTGGGCGCCGAGAACAGCGTGGCCTACAGCAACAACAGCATCGC | |
| | CATCCCCACCAACTTCACCATCAGCGTGACCACCGAGATCCTGCCCG | |
| | TGAGCATGACCAAGACCAGCGTGGACTGCACCATGTACATCTGCGG | |
| | CGACAGCACCGAGTGCAGCAACCTGCTGCTGCAGTACGGCAGCTTC | |
| | TGCACCCAGCTGAACAGGGCCCTGACCGGCATCGCCGTGGAGCAG | |
| | GACAAGAACACCCAGGAGGTGTTCGCCCAGGTGAAGCAGATCTACA | |
| | AGACCCCCCCCATCAAGGACTTCGGCGGCTTCAACTTCAGCCAGATC | |
| | CTGCCCGACCCCAGCAAGCCCAGCAAGAGGAGCCCCATCGAGGAC | |
| | CTGCTGTTCAACAAGGTGACCCTGGCCGACGCCGGCTTCATCAAGC | |
| | AGTACGGCGACTGCCTGGGCGACATCGCCGCCAGGGACCTGATCTG | |
| | CGCCCAGAAGTTCAACGGCCTGACCGTGCTGCCCCCCCTGCTGACC | |
| | GACGAGATGATCGCCCAGTACACCAGCGCCCTGCTGGCCGGCACCA | |
| | TCACCAGCGGCTGGACCTTCGGCGCCGGCCCCGCCCTGCAGATCC | |
| | CCTTCCCCATGCAGATGGCCTACAGGTTCAACGGCATCGGCGTGAC | |
| | CCAGAACGTGCTGTACGAGAACCAGAAGCTGATCGCCAACCAGTTCA | |
| | ACAGCGCCATCGGCAAGATCCAGGACAGCCTGAGCAGCACCCCCAG | |
| | CGCCCTGGGCAAGCTGCAGGACGTGGTGAACCAGAACGCCCAGGC | |
| | CCTGAACACCCTGGTGAAGCAGCTGAGCAGCAACTTCGGCGCCATC | |
| | AGCAGCGTGCTGAACGACATCCTGAGCAGGCTGGACCCCCCCGAGG | |
| | CCGAGGTGCAGATCGACAGGCTGATCACCGGCAGGCTGCAGAGCCT | |
| | GCAGACCTACGTGACCCAGCAGCTGATCAGGGCCGCCGAGATCAGG | |
| | GCCAGCGCCAACCTGGCCGCCACCAAGATGAGCGAGTGCGTGCTG | |
| | GGCCAGAGCAAGAGGGTGGACTTCTGCGGCAAGGGCTACCACCTGA | |
| | TGAGCTTCCCCCAGAGCGCCCCCCACGGCGTGGTGTTCCTGCACGT | |
| | GACCTACGTGCCCGCCCAGGAGAAGAACTTCACCACCGCCCCCGCC | |
| | ATCTGCCACGACGGCAAGGCCCACTTCCCCAGGGAGGGCGTGTTCG | |
| | TGAGCAACGGCACCCACTGGTTCGTGACCCAGAGGAACTTCTACGA | |
| | GCCCCAGATCATCACCACCGACAACACCTTCGTGAGCGGCAACTGC | |
| | GACGTGGTGATCGGCATCGTGAACAACACCGTGTACGACCCCCTGC | |
| | AGCCCGAGCTGGACAGCTTCAAGGAGGAGCTGGACAAGTACTTCAA | |
| | GAACCACACCAGCCCCGACGTGGACCTGGGCGACATCAGCGGCATC | |
| | AACGCCAGCGTGGTGAACATCCAGAAGGAGATCGACAGGCTGAACG | |
| | AGGTGGCCAAGAACCTGAACGAGAGCCTGATCGACCTGCAGGAGCT | |
| | GGGCAAGTACGAGCAGTACATCAAGTGGCCCTGGTACATCTGGCTG | |
| | GGCTTCATCGCCGGCCTGATCGCCATCGTGATGGTGACCATCATGCT | |
| | GTGCTGCATGACCAGCTGCTGCAGCTGCCTGAAGGGCTGCTGCAGC | |
| | TGCGGCAGCTGCTGCAAGTTCGACGAGGACGACAGCGAGCCCGTG | |
| | CTGAAGGGCGTGAAGCTGCACTACACCGGAAGCGGAGCCACGAACT | |
| | TCTCTCTGTTAAAGCAAGCAGGAGATGTTGAAGAAAACCCCGGGCCT | |
| | ATGAAGGCAATACTAGTAGTTCTGCTATATACATTTGCAACCGCAAAT | |
| | GCAGACACATTATGTATAGGTTATCATGCGAACAACTCAACAGACACT | |
| | GTAGACACAGTACTAGAAAAGAATGTAACAGTAACACACTCTGTTAAC | |
| | CTTCTAGAAGACAAGCATAACGGGAAACTATGCAAACTAAGAGGGGT | |
| | AGCCCCATTGCATTTGGGTAAATGTAACATTGCTGGCTGGATCCTGG | |
| | GAAATCCAGAGTGTGAATCACTCTCCACAGCAAGCTCATGGTCCTAC | |
| | ATTGTGGAAACATCTAGTTCAGACAATGGAACGTGTTACCCAGGAGA | |
| | TTTCATCGATTATGAGGAGCTAAGAGAGCAATTGAGCTCAGTGTCAT | |
| | CATTTGAAAGGTTTGAGATATTCCCCAAGACAAGTTCATGGCCCAATC | |
| | ATGACTCGAACAAAGGTGTAACGACAGCATGTCCTCATGCTGGAGCA | |
| | AAAAGCTTCTACAAAAATTTAATATGGCTAGTTAAAAAAGGAAATTCAT | |
| | ACCCAAAGCTCAGCAAATCCTACATTAATGATAAAGGGAAAGAAGTC | |
| | CTCGTGCTATGGGGCATTCACCATCCACCTACTAGTGCTGACCAACA | |
| | AAGTCTCTATCAGAATGCAGATGCATATGTTTTTGTGGGGACATCAAG | |
| | ATACAGCAAGAAGTTCAAGCCGGAAATAGCAATAAGGCCCAAAGTGA | |
| | GGGATCAAGAAGGGAGAATGAACTATTACTGGACACTAGTAGAGCCG | |
| | GGAGACAAAATAACATTCGAAGCAACTGGAAATCTAGTGGTACCGAG | |
| | ATATGCATTCGCAATGGAAAGAAATGCTGGATCTGGTATTATCATTTC | |
| | AGATACACCAGTCCACGATTGCAATACAACTTGTCAGACACCCAAGG | |
| | GTGCTATAAACACCAGCCTCCCATTTCAGAACATACATCCGATCACAA | |
| | TTGGAAAATGTCCAAAATATGTAAAAAGCACAAAATTGAGACTGGCCA | |
| | CAGGATTGAGGAATGTCCCGTCCATTCAATCTAGAGGCCTATTTGGG | |
| | GCCATTGCCGGTTTCATTGAAGGGGGGTGGACAGGGATGGTAGATG | |
| | GATGGTACGGTTATCACCATCAAAATGAGCAGGGGTCAGGATATGCA | |
| | GCCGACCTGAAGAGCACACAGAATGCCATTGACGAGATTACTAACAA | |
| | AGTAAACTCTGTTATTGAAAAAATGAATACACAGTTCACAGCAGTAGG | |
| | TAAAGAGTTCAACCACCTGGAAAAAAGAATAGAGAATTTAAATAAAAA | |
| | AGTTGATGATGGTTTCCTGGACATTTGGACTTACAATGCCGAACTGTT | |
| | GGTTCTATTGGAAAATGAAAGAACTTTGGACTACCACGATTCAAAGGT | |
| | GAAGAACTTATATGAAAAGGTAAGAAGCCAGTTAAAAAACAATGCCAA | |
| | GGAAATTGGAAACGGCTGCTTTGAATTTTACCACAAATGTGATAACAC | |
| | GTGCATGGAAAGTGTCAAAAATGGGACTTATGACTACCCAAAATACT | |
| | CAGAGGAAGCAAAATTAAACAGAGAAGAAATAGATGGGGTAAAGCTG | |
| | GAATCAACAAGGATTTACCAGATTTTGGCGATCTATTCAACCGTCGCC | |
| | AGTTCATTGGTACTGGTAGTCTCCCTGGGGGCAATCAGTTTCTGGAT | |
| | GTGCTCTAATGGGTCTCTACAGTGTAGAATATGTATTTAAGGAAGCG | |
| | GAGCCACGAACTTCTCTCTGTTAAAGCAAGCAGGAGATGTTGAAGAA | |
| | AACCCCGGGCCTAGCAAAAGCAGGGGATAATTCTATTAACCATGAAG | |
| | ACTATCATTGCTTTGAGCTACATTCTATGTCTGGTTTTCGCTCAAAAA | |
| | CTTCCTGGAAATGACAATAGCACTGCAACGCTGTGCCTTGGGCACCA | |
| | TGCAGTACCAAACGGAACGATAGTGAAAACAATCACGAATGACCAAA | |
| | TTGAAGTTACTAATGCTACTGAGCTGGTTCAGAATTCCTCAATAGGTG | |
| | AAATATGCGACAGTCCTCATCAGATCCTTGATGGAGAAAACTGCACA | |
| | CTAATAGATGCTCTATTGGGAGACCCTCAGTGTGATGGCTTTCAAAAT | |
| | AAGAAATGGGACCTTTTTGTTGAACGAAGCAAAGCCTACAGCAACTG | |
| | TTACCCTTATGATGTGCCGGATTATGCCTCCCTTAGGTCACTAGTTGC | |
| | CTCATCCGGCACACTGGAGTTTAACAATGAAAGCTTCAATTGGGCTG | |
| | GAGTCACTCAAAACGGAACAAGTTCTGCTTGCATAAGGGGATCTAAT | |
| | AGTAGTTTCTTTAGTAGATTAAATTGGTTGACCCACTTAAACTTCAAGT | |
| | ACCCAGCATTGAACGTGACTATGCCAAACAATGAACAATTTGACAAAT | |
| | TGTACATTTGGGGGGTTCACCACCCGGGTACGGACAAGGACCAAAT | |
| | CTTCCTGTATGCTCAATCATCAGGAAGAATCACAGTATCTACCAAAAG | |
| | AAGCCAACAAGCTGTAATCCCGAATATCGGATCTAGACCCAGAATAA | |
| | GGAATATCCCTAGCAGAATAAGCATCTATTGGACAATAGTAAAACCG | |
| | GGAGACATACTTTTGATTAACAGCACAGGGAATCTAATTGCTCCTAG | |
| | GGGTTACTTCAAAATACGAAGTGGGAAAAGCTCAATAATGAGATCAG | |
| | ATGCACCCATTGGCAAATGCAAGTCTGAATGCATCACTCCAAATGGA | |
| | AGCATTCCCAATGACAAACCATTCCAAAATGTAAACAGGATCACATAC | |
| | GGGGCCTGTCCCAGATATGTTAAGCAAAGCACTCTGAAATTGGCAAC | |
| | AGGAATGCGAAATGTACCAGAGAAACAAACTAGAGGCATATTTGGCG | |
| | CAATAGCGGGTTTCATAGAAAATGGTTGGGAGGGAATGGTGGATGGT | |
| | TGGTACGGTTTCAGGCATCAAAATTCTGAGGGAAGAGGACAAGCAGC | |
| | AGATCTCAAAAGCACTCAAGCAGCAATCGATCAAATCAATGGGAAGC | |
| | TGAATCGATTGATCGGGAAAACCAACGAGAAATTCCATCAGATTGAG | |
| | AAAGAATTCTCAGAAGTAGAAGGGAGAATTCAGGACCTTGAGAAATA | |
| | TGTTGAGGACACAAAAATAGATCTCTGGTCATACAACGCAGAGCTTC | |
| | TTGTTGCCCTGGAAAACCAACATACAATTGATCTAACTGACTCAGAAA | |
| | TGAACAAACTGTTTGAAAAAACAAAGAAGCAACTGAGGGAAAATGCT | |
| | GAGGATATGGGCAATGGTTGTTTCAAAATATACCACAAATGTGACAAT | |
| | GCCTGCATAGGATCAATCAGAAATGGAACTTATGACCACGATGTATA | |
| | CAGGGATGAAGCATTAAACAACCGGTTCCAGATCAAGGGAGTTGAGC | |
| | TGAAGTCAGGGTACAAAGATTGGATCCTATGGATTTCCTTTGCCATAT | |
| | CATGTTTTTTGCTTTGTGTTGCTTTGTTGGGGTTCATCATGTGGGCCT | |
| | GCCAAAAGGGCAACATTAGGTGCAACATTTGCATTTGAGTGCATTAAT | |
| | TAAAAACACCCTTGTTTCTACTGGAAGCGGAGCCACGAACTTCTCTCT | |
| | GTTAAAGCAAGCAGGAGATGTTGAAGAAAACCCCGGGCCTATTTTCT | |
| | AATATCCACAAAATGAAGGCAATAATTGTACTACTCATGGTAGTAACA | |
| | TCCAATGCAGATCGAATCTGCACTGGGATAACATCGTCAAACTCACC | |
| | ACATGTCGTCAAAACTGCTACTCAAGGGGAGGTCAACGTGACCGGT | |
| | GTAATACCACTGACAACAACACCCACCAAATCTCATTTTGCAAATCTC | |
| | AAAGGAACAGAAACCAGGGGGAAACTATGCCCAAAATGCCTCAACTG | |
| | CACAGATCTGGATGTAGCCTTGGGCAGACCAAAATGCACAGGGAAAA | |
| | TACCCTCTGCAAGGGTTTCAATACTCCATGAAGTCAGACCTGTTACAT | |
| | CTGGGTGCTTTCCTATAATGCACGATAGAACAAAAATTAGACAGCTG | |
| | CCTAACCTTCTCCGAGGATACGAACATGTCAGGTTATCAACTCACAA | |
| | CGTTATCAATGCAAAAGATGCACCAGGAAGACCCTACGAAATTGGAA | |
| | CCTCAGGGTCTTGCCCTAACATTACCAATGGAAACGGATTCTTCGCA | |
| | ACAATGGCTTGGGCCGTCCCAAAAAACAAAACAGCAACAAATCCATT | |
| | AACAATAGAAGTACCATACATTTGTACAGAAGGAGAAGACCAAATTAC | |
| | CGTTTGGGGGTTCCACTCTGACAACGAGACCCAAATGGCAAAGCTCT | |
| | ATGGGGACTCAAAGCCCCAGAAGTTCACCTCATCTGCCAACGGAGT | |
| | GACCACACATTACGTTTCACAGATTGGTGGCTTCCCAAATCAAACAG | |
| | AAGACGGAGGACTACCACAAAGTGGCAGAATTGTTGTTGATTACATG | |
| | GTGCAGAAATCTGGAAAAACAGGAACAATTACCTATCAAAGAGGTATT | |
| | TTATTGCCTCAAAAAGTGTGGTGCGCAAGTGGCAGGAGCAAGGTAAT | |
| | AAAAGGATCCTTGCCCTTAATTGGAGAAGCAGATTGCCTCCATGAAA | |
| | AATACGGTGGATTAAACAAAAGCAAGCCTTACTACACAGGGGAACAT | |
| | GCAAAGGCCATAGGAAATTGCCCAATATGGGTGAAAACACCCTTGAA | |
| | GCTGGCCAATGGAACCAAATATAGACCCCCTGCAAAACTATTAAAGG | |
| | AAAGAGGTTTCTTCGGAGCCATTGCTGGTTTCTTAGAGGGAGGATGG | |
| | GAAGGAATGATTGCAGGTTGGCACGGATACACATCCCATGGGGCAC | |
| | ATGGAGTAGCGGTGGCAGCTGACCTTAAGAGCACTCAAGAGGCCAT | |
| | AAACAAGATAACAAAAAATCTCAACTCTTTGAGTGAGCTGGAAGTAAA | |
| | GAATCTTCAAAGACTAAGCGGTGCCATGGATGAACTCCACAACGAAA | |
| | TACTAGAACTAGATGAGAAAGTGGATGATCTCAGAGCTGACACAATA | |
| | AGCTCACAAATAGAACTCGCAGTCCTGCTTTCCAATGAAGGAATAATA | |
| | AACAGTGAAGATGAACATCTCTTGGCGCTTGAAAGAAAGCTGAAGAA | |
| | AATGCTGGGCCCCTCTGCTGTAGAGATAGGGAATGGATGCTTTGAAA | |
| | CCAAACACAAGTGCAACCAGACCTGCCTCGACAGAATAGCTGCTGGT | |
| | ACCTTTGATGCAGGAGAATTTTCTCTCCCCACCTTTGATTCACTGAAT | |
| | ATTACTGCTGCATCTTTAAATGACGACGGATTGGACAATCATACTATA | |
| | CTGCTTTACTACTCAACTGCTGCCTCCAGTTTGGCTGTAACACTGATG | |
| | ATAGCTATCTTTGTTGTTTATATGGTCTCCAGAGACAATGTTTCTTGCT | |
| | CCATTTGTCTATAAGGAAAGTTAAGCCCTGTATTTTCCTTTATTGTAGT | |
| | GCTTGTTTGCTTGTTGTCATTACAAAGAAACGTTATTGAAAAATTGAT | |
| | GACTCGAGCTGGTACTGCATGCACGCAATGCTAGCTGCCCCTTTCCC | |
| | GTCCTGGGTACCCCGAGTCTCCCCCGACCTCGGGTCCCAGGTATGC | |
| | TCCCACCTCCACCTGCCCCACTCACCACCTCTGCTAGTTCCAGACAC | |
| | CTCCCAAGCACGCAGCAATGCAGCTCAAAACGCTTAGCCTAGCCACA | |
| | CCCCCACGGGAAACAGCAGTGATTAACCTTTAGCAATAAACGAAAGT | |
| | TTAACTAAGCTATACTAACCCCAGGGTTGGTCAATTTCGTGCCAGCC | |
| | ACACCCTGGAGCTAGCAAAAAAAA | |
| Pan-CoV-Flu | TAGTTATTAATAGTAATCAATTACGGGGTCATTAGTTCATAGCCCATAT | 408 |
| Vaccine #20 | ATGGAGTTCCGCGTTACATAACTTACGGTAAATGGCCCGCCTGGCTG | |
| CoV-Wuhan | ACCGCCCAACGACCCCCGCCCATTGACGTCAATAATGACGTATGTTC | |
| Spike(2 proline | CCATAGTAACGCCAATAGGGACTTTCCATTGACGTCAATGGGTGGAG | |
| substitution)- | TATTTACGGTAAACTGCCCACTTGGCAGTACATCAAGTGTATCATATG | |
| Influenza (HA) | CCAAGTACGCCCCCTATTGACGTCAATGACGGTAAATGGCCCGCCTG | |
| | GCATTATGCCCAGTACATGACCTTATGGGACTTTCCTACTTGGCAGTA | |
| | CATCTACGTATTAGTCATCGCTATTACCATGGTGATGCGGTTTTGGCA | |
| | GTACATCAATGGGCGTGGATAGCGGTTTGACTCACGGGGATTTCCAA | |
| | GTCTCCACCCCATTGACGTCAATGGGAGTTTGTTTTGGCACCAAAAT | |
| | CAACGGGACTTTCCAAAATGTCGTAACAACTCCGCCCCATTGACGCA | |
| | AATGGGCGGTAGGCGTGTACGGTGGGAGGTCTATATAAGCAGAGCT | |
| | GGTTTAGTGAACCGTCAGATCGAGAATAAACTAGTATTCTTCTGGTCC | |
| | CCACAGACTCAGAGAGAACCCGCCACCATGTTCGTGTTCCTGGTGCT | |
| | GCTGCCCCTGGTGAGCAGCCAGTGCGTGAACCTGACCACCAGGACC | |
| | CAGCTGCCCCCCGCCTACACCAACAGCTTCACCAGGGGCGTGTACT | |
| | ACCCCGACAAGGTGTTCAGGAGCAGCGTGCTGCACAGCACCCAGGA | |
| | CCTGTTCCTGCCCTTCTTCAGCAACGTGACCTGGTTCCACGCCATCC | |
| | ACGTGAGCGGCACCAACGGCACCAAGAGGTTCGACAACCCCGTGCT | |
| | GCCCTTCAACGACGGCGTGTACTTCGCCAGCACCGAGAAGAGCAAC | |
| | ATCATCAGGGGCTGGATCTTCGGCACCACCCTGGACAGCAAGACCC | |
| | AGAGCCTGCTGATCGTGAACAACGCCACCAACGTGGTGATCAAGGT | |
| | GTGCGAGTTCCAGTTCTGCAACGACCCCTTCCTGGGCGTGTACTACC | |
| | ACAAGAACAACAAGAGCTGGATGGAGAGCGAGTTCAGGGTGTACAG | |
| | CAGCGCCAACAACTGCACCTTCGAGTACGTGAGCCAGCCCTTCCTG | |
| | ATGGACCTGGAGGGCAAGCAGGGCAACTTCAAGAACCTGAGGGAGT | |
| | TCGTGTTCAAGAACATCGACGGCTACTTCAAGATCTACAGCAAGCAC | |
| | ACCCCCATCAACCTGGTGAGGGACCTGCCCCAGGGCTTCAGCGCCC | |
| | TGGAGCCCCTGGTGGACCTGCCCATCGGCATCAACATCACCAGGTT | |
| | CCAGACCCTGCTGGCCCTGCACAGGAGCTACCTGACCCCCGGCGAC | |
| | AGCAGCAGCGGCTGGACCGCCGGCGCCGCCGCCTACTACGTGGGC | |
| | TACCTGCAGCCCAGGACCTTCCTGCTGAAGTACAACGAGAACGGCA | |
| | CCATCACCGACGCCGTGGACTGCGCCCTGGACCCCCTGAGCGAGAC | |
| | CAAGTGCACCCTGAAGAGCTTCACCGTGGAGAAGGGCATCTACCAG | |
| | ACCAGCAACTTCAGGGTGCAGCCCACCGAGAGCATCGTGAGGTTCC | |
| | CCAACATCACCAACCTGTGCCCCTTCGGCGAGGTGTTCAACGCCAC | |
| | CAGGTTCGCCAGCGTGTACGCCTGGAACAGGAAGAGGATCAGCAAC | |
| | TGCGTGGCCGACTACAGCGTGCTGTACAACAGCGCCAGCTTCAGCA | |
| | CCTTCAAGTGCTACGGCGTGAGCCCCACCAAGCTGAACGACCTGTG | |
| | CTTCACCAACGTGTACGCCGACAGCTTCGTGATCAGGGGCGACGAG | |
| | GTGAGGCAGATCGCCCCCGGCCAGACCGGCAAGATCGCCGACTACA | |
| | ACTACAAGCTGCCCGACGACTTCACCGGCTGCGTGATCGCCTGGAA | |
| | CAGCAACAACCTGGACAGCAAGGTGGGCGGCAACTACAACTACCTG | |
| | TACAGGCTGTTCAGGAAGAGCAACCTGAAGCCCTTCGAGAGGGACA | |
| | TCAGCACCGAGATCTACCAGGCCGGCAGCACCCCCTGCAACGGCGT | |
| | GGAGGGCTTCAACTGCTACTTCCCCCTGCAGAGCTACGGCTTCCAG | |
| | CCCACCAACGGCGTGGGCTACCAGCCCTACAGGGTGGTGGTGCTGA | |
| | GCTTCGAGCTGCTGCACGCCCCCGCCACCGTGTGCGGCCCCAAGAA | |
| | GAGCACCAACCTGGTGAAGAACAAGTGCGTGAACTTCAACTTCAACG | |
| | GCCTGACCGGCACCGGCGTGCTGACCGAGAGCAACAAGAAGTTCCT | |
| | GCCCTTCCAGCAGTTCGGCAGGGACATCGCCGACACCACCGACGCC | |
| | GTGAGGGACCCCCAGACCCTGGAGATCCTGGACATCACCCCCTGCA | |
| | GCTTCGGCGGCGTGAGCGTGATCACCCCCGGCACCAACACCAGCAA | |
| | CCAGGTGGCCGTGCTGTACCAGGACGTGAACTGCACCGAGGTGCCC | |
| | GTGGCCATCCACGCCGACCAGCTGACCCCCACCTGGAGGGTGTACA | |
| | GCACCGGCAGCAACGTGTTCCAGACCAGGGCCGGCTGCCTGATCG | |
| | GCGCCGAGCACGTGAACAACAGCTACGAGTGCGACATCCCCATCGG | |
| | CGCCGGCATCTGCGCCAGCTACCAGACCCAGACCAACAGCCCCAGG | |
| | AGGGCCAGGAGCGTGGCCAGCCAGAGCATCATCGCCTACACCATGA | |
| | GCCTGGGCGCCGAGAACAGCGTGGCCTACAGCAACAACAGCATCGC | |
| | CATCCCCACCAACTTCACCATCAGCGTGACCACCGAGATCCTGCCCG | |
| | TGAGCATGACCAAGACCAGCGTGGACTGCACCATGTACATCTGCGG | |
| | CGACAGCACCGAGTGCAGCAACCTGCTGCTGCAGTACGGCAGCTTC | |
| | TGCACCCAGCTGAACAGGGCCCTGACCGGCATCGCCGTGGAGCAG | |
| | GACAAGAACACCCAGGAGGTGTTCGCCCAGGTGAAGCAGATCTACA | |
| | AGACCCCCCCCATCAAGGACTTCGGCGGCTTCAACTTCAGCCAGATC | |
| | CTGCCCGACCCCAGCAAGCCCAGCAAGAGGAGCTTCATCGAGGACC | |
| | TGCTGTTCAACAAGGTGACCCTGGCCGACGCCGGCTTCATCAAGCA | |
| | GTACGGCGACTGCCTGGGCGACATCGCCGCCAGGGACCTGATCTGC | |
| | GCCCAGAAGTTCAACGGCCTGACCGTGCTGCCCCCCCTGCTGACCG | |
| | ACGAGATGATCGCCCAGTACACCAGCGCCCTGCTGGCCGGCACCAT | |
| | CACCAGCGGCTGGACCTTCGGCGCCGGCGCCGCCCTGCAGATCCC | |
| | CTTCGCCATGCAGATGGCCTACAGGTTCAACGGCATCGGCGTGACC | |
| | CAGAACGTGCTGTACGAGAACCAGAAGCTGATCGCCAACCAGTTCAA | |
| | CAGCGCCATCGGCAAGATCCAGGACAGCCTGAGCAGCACCGCCAGC | |
| | GCCCTGGGCAAGCTGCAGGACGTGGTGAACCAGAACGCCCAGGCC | |
| | CTGAACACCCTGGTGAAGCAGCTGAGCAGCAACTTCGGCGCCATCA | |
| | GCAGCGTGCTGAACGACATCCTGAGCAGGCTGGACCCCCCCGAGG | |
| | CCGAGGTGCAGATCGACAGGCTGATCACCGGCAGGCTGCAGAGCCT | |
| | GCAGACCTACGTGACCCAGCAGCTGATCAGGGCCGCCGAGATCAGG | |
| | GCCAGCGCCAACCTGGCCGCCACCAAGATGAGCGAGTGCGTGCTG | |
| | GGCCAGAGCAAGAGGGTGGACTTCTGCGGCAAGGGCTACCACCTGA | |
| | TGAGCTTCCCCCAGAGCGCCCCCCACGGCGTGGTGTTCCTGCACGT | |
| | GACCTACGTGCCCGCCCAGGAGAAGAACTTCACCACCGCCCCCGCC | |
| | ATCTGCCACGACGGCAAGGCCCACTTCCCCAGGGAGGGCGTGTTCG | |
| | TGAGCAACGGCACCCACTGGTTCGTGACCCAGAGGAACTTCTACGA | |
| | GCCCCAGATCATCACCACCGACAACACCTTCGTGAGCGGCAACTGC | |
| | GACGTGGTGATCGGCATCGTGAACAACACCGTGTACGACCCCCTGC | |
| | AGCCCGAGCTGGACAGCTTCAAGGAGGAGCTGGACAAGTACTTCAA | |
| | GAACCACACCAGCCCCGACGTGGACCTGGGCGACATCAGCGGCATC | |
| | AACGCCAGCGTGGTGAACATCCAGAAGGAGATCGACAGGCTGAACG | |
| | AGGTGGCCAAGAACCTGAACGAGAGCCTGATCGACCTGCAGGAGCT | |
| | GGGCAAGTACGAGCAGTACATCAAGTGGCCCTGGTACATCTGGCTG | |
| | GGCTTCATCGCCGGCCTGATCGCCATCGTGATGGTGACCATCATGCT | |
| | GTGCTGCATGACCAGCTGCTGCAGCTGCCTGAAGGGCTGCTGCAGC | |
| | TGCGGCAGCTGCTGCAAGTTCGACGAGGACGACAGCGAGCCCGTG | |
| | CTGAAGGGCGTGAAGCTGCACTACACCGGAAGCGGAGCCACGAACT | |
| | TCTCTCTGTTAAAGCAAGCAGGAGATGTTGAAGAAAACCCCGGGCCT | |
| | ATGAAGGCAATACTAGTAGTTCTGCTATATACATTTGCAACCGCAAAT | |
| | GCAGACACATTATGTATAGGTTATCATGCGAACAACTCAACAGACACT | |
| | GTAGACACAGTACTAGAAAAGAATGTAACAGTAACACACTCTGTTAAC | |
| | CTTCTAGAAGACAAGCATAACGGGAAACTATGCAAACTAAGAGGGGT | |
| | AGCCCCATTGCATTTGGGTAAATGTAACATTGCTGGCTGGATCCTGG | |
| | GAAATCCAGAGTGTGAATCACTCTCCACAGCAAGCTCATGGTCCTAC | |
| | ATTGTGGAAACATCTAGTTCAGACAATGGAACGTGTTACCCAGGAGA | |
| | TTTCATCGATTATGAGGAGCTAAGAGAGCAATTGAGCTCAGTGTCAT | |
| | CATTTGAAAGGTTTGAGATATTCCCCAAGACAAGTTCATGGCCCAATC | |
| | ATGACTCGAACAAAGGTGTAACGACAGCATGTCCTCATGCTGGAGCA | |
| | AAAAGCTTCTACAAAAATTTAATATGGCTAGTTAAAAAAGGAAATTCAT | |
| | ACCCAAAGCTCAGCAAATCCTACATTAATGATAAAGGGAAAGAAGTC | |
| | CTCGTGCTATGGGGCATTCACCATCCACCTACTAGTGCTGACCAACA | |
| | AAGTCTCTATCAGAATGCAGATGCATATGTTTTTGTGGGGACATCAAG | |
| | ATACAGCAAGAAGTTCAAGCCGGAAATAGCAATAAGGCCCAAAGTGA | |
| | GGGATCAAGAAGGGAGAATGAACTATTACTGGACACTAGTAGAGCCG | |
| | GGAGACAAAATAACATTCGAAGCAACTGGAAATCTAGTGGTACCGAG | |
| | ATATGCATTCGCAATGGAAAGAAATGCTGGATCTGGTATTATCATTTC | |
| | AGATACACCAGTCCACGATTGCAATACAACTTGTCAGACACCCAAGG | |
| | GTGCTATAAACACCAGCCTCCCATTTCAGAACATACATCCGATCACAA | |
| | TTGGAAAATGTCCAAAATATGTAAAAAGCACAAAATTGAGACTGGCCA | |
| | CAGGATTGAGGAATGTCCCGTCCATTCAATCTAGAGGCCTATTTGGG | |
| | GCCATTGCCGGTTTCATTGAAGGGGGGTGGACAGGGATGGTAGATG | |
| | GATGGTACGGTTATCACCATCAAAATGAGCAGGGGTCAGGATATGCA | |
| | GCCGACCTGAAGAGCACACAGAATGCCATTGACGAGATTACTAACAA | |
| | AGTAAACTCTGTTATTGAAAAAATGAATACACAGTTCACAGCAGTAGG | |
| | TAAAGAGTTCAACCACCTGGAAAAAAGAATAGAGAATTTAAATAAAAA | |
| | AGTTGATGATGGTTTCCTGGACATTTGGACTTACAATGCCGAACTGTT | |
| | GGTTCTATTGGAAAATGAAAGAACTTTGGACTACCACGATTCAAAGGT | |
| | GAAGAACTTATATGAAAAGGTAAGAAGCCAGTTAAAAAACAATGCCAA | |
| | GGAAATTGGAAACGGCTGCTTTGAATTTTACCACAAATGTGATAACAC | |
| | GTGCATGGAAAGTGTCAAAAATGGGACTTATGACTACCCAAAATACT | |
| | CAGAGGAAGCAAAATTAAACAGAGAAGAAATAGATGGGGTAAAGCTG | |
| | GAATCAACAAGGATTTACCAGATTTTGGCGATCTATTCAACCGTCGCC | |
| | AGTTCATTGGTACTGGTAGTCTCCCTGGGGGCAATCAGTTTCTGGAT | |
| | GTGCTCTAATGGGTCTCTACAGTGTAGAATATGTATTTAAGGAAGCG | |
| | GAGCCACGAACTTCTCTCTGTTAAAGCAAGCAGGAGATGTTGAAGAA | |
| | AACCCCGGGCCTAGCAAAAGCAGGGGATAATTCTATTAACCATGAAG | |
| | ACTATCATTGCTTTGAGCTACATTCTATGTCTGGTTTTCGCTCAAAAA | |
| | CTTCCTGGAAATGACAATAGCACTGCAACGCTGTGCCTTGGGCACCA | |
| | TGCAGTACCAAACGGAACGATAGTGAAAACAATCACGAATGACCAAA | |
| | TTGAAGTTACTAATGCTACTGAGCTGGTTCAGAATTCCTCAATAGGTG | |
| | AAATATGCGACAGTCCTCATCAGATCCTTGATGGAGAAAACTGCACA | |
| | CTAATAGATGCTCTATTGGGAGACCCTCAGTGTGATGGCTTTCAAAAT | |
| | AAGAAATGGGACCTTTTTGTTGAACGAAGCAAAGCCTACAGCAACTG | |
| | TTACCCTTATGATGTGCCGGATTATGCCTCCCTTAGGTCACTAGTTGC | |
| | CTCATCCGGCACACTGGAGTTTAACAATGAAAGCTTCAATTGGGCTG | |
| | GAGTCACTCAAAACGGAACAAGTTCTGCTTGCATAAGGGGATCTAAT | |
| | AGTAGTTTCTTTAGTAGATTAAATTGGTTGACCCACTTAAACTTCAAGT | |
| | ACCCAGCATTGAAGGTGACTATGCCAAACAATGAACAATTTGACAAAT | |
| | TGTACATTTGGGGGGTTCACCACCCGGGTACGGACAAGGACCAAAT | |
| | CTTCCTGTATGCTCAATCATCAGGAAGAATCACAGTATCTACCAAAAG | |
| | AAGCCAACAAGCTGTAATCCCGAATATCGGATCTAGACCCAGAATAA | |
| | GGAATATCCCTAGCAGAATAAGCATCTATTGGACAATAGTAAAACCG | |
| | GGAGACATACTTTTGATTAACAGCACAGGGAATCTAATTGCTCCTAG | |
| | GGGTTACTTCAAAATACGAAGTGGGAAAAGCTCAATAATGAGATCAG | |
| | ATGCACCCATTGGCAAATGCAAGTCTGAATGCATCACTCCAAATGGA | |
| | AGCATTCCCAATGACAAACCATTCCAAAATGTAAACAGGATCACATAC | |
| | GGGGCCTGTCCCAGATATGTTAAGCAAAGCACTCTGAAATTGGCAAC | |
| | AGGAATGCGAAATGTACCAGAGAAACAAACTAGAGGCATATTTGGCG | |
| | CAATAGCGGGTTTCATAGAAAATGGTTGGGAGGGAATGGTGGATGGT | |
| | TGGTACGGTTTCAGGCATCAAAATTCTGAGGGAAGAGGACAAGCAGC | |
| | AGATCTCAAAAGCACTCAAGCAGCAATCGATCAAATCAATGGGAAGC | |
| | TGAATCGATTGATCGGGAAAACCAACGAGAAATTCCATCAGATTGAG | |
| | AAAGAATTCTCAGAAGTAGAAGGGAGAATTCAGGACCTTGAGAAATA | |
| | TGTTGAGGACACAAAAATAGATCTCTGGTCATACAACGCAGAGCTTC | |
| | TTGTTGCCCTGGAAAACCAACATACAATTGATCTAACTGACTCAGAAA | |
| | TGAACAAACTGTTTGAAAAAACAAAGAAGCAACTGAGGGAAAATGCT | |
| | GAGGATATGGGCAATGGTTGTTTCAAAATATACCACAAATGTGACAAT | |
| | GCCTGCATAGGATCAATCAGAAATGGAACTTATGACCACGATGTATA | |
| | CAGGGATGAAGCATTAAACAACCGGTTCCAGATCAAGGGAGTTGAGC | |
| | TGAAGTCAGGGTACAAAGATTGGATCCTATGGATTTCCTTTGCCATAT | |
| | CATGTTTTTTGCTTTGTGTTGCTTTGTTGGGGTTCATCATGTGGGCCT | |
| | GCCAAAAGGGCAACATTAGGTGCAACATTTGCATTTGAGTGCATTAAT | |
| | TAAAAACACCCTTGTTTCTACTGGAAGCGGAGCCACGAACTTCTCTCT | |
| | GTTAAAGCAAGCAGGAGATGTTGAAGAAAACCCCGGGCCTATTTTCT | |
| | AATATCCACAAAATGAAGGCAATAATTGTACTACTCATGGTAGTAACA | |
| | TCCAATGCAGATCGAATCTGCACTGGGATAACATCGTCAAACTCACC | |
| | ACATGTCGTCAAAACTGCTACTCAAGGGGAGGTCAACGTGACCGGT | |
| | GTAATACCACTGACAACAACACCCACCAAATCTCATTTTGCAAATCTC | |
| | AAAGGAACAGAAACCAGGGGGAAACTATGCCCAAAATGCCTCAACTG | |
| | CACAGATCTGGATGTAGCCTTGGGCAGACCAAAATGCACAGGGAAAA | |
| | TACCCTCTGCAAGGGTTTCAATACTCCATGAAGTCAGACCTGTTACAT | |
| | CTGGGTGCTTTCCTATAATGCACGATAGAACAAAAATTAGACAGCTG | |
| | CCTAACCTTCTCCGAGGATACGAACATGTCAGGTTATCAACTCACAA | |
| | CGTTATCAATGCAAAAGATGCACCAGGAAGACCCTACGAAATTGGAA | |
| | CCTCAGGGTCTTGCCCTAACATTACCAATGGAAACGGATTCTTCGCA | |
| | ACAATGGCTTGGGCCGTCCCAAAAAACAAAACAGCAACAAATCCATT | |
| | AACAATAGAAGTACCATACATTTGTACAGAAGGAGAAGACCAAATTAC | |
| | CGTTTGGGGGTTCCACTCTGACAACGAGACCCAAATGGCAAAGCTCT | |
| | ATGGGGACTCAAAGCCCCAGAAGTTCACCTCATCTGCCAACGGAGT | |
| | GACCACACATTACGTTTCACAGATTGGTGGCTTCCCAAATCAAACAG | |
| | AAGACGGAGGACTACCACAAAGTGGCAGAATTGTTGTTGATTACATG | |
| | GTGCAGAAATCTGGAAAAACAGGAACAATTACCTATCAAAGAGGTATT | |
| | TTATTGCCTCAAAAAGTGTGGTGCGCAAGTGGCAGGAGCAAGGTAAT | |
| | AAAAGGATCCTTGCCCTTAATTGGAGAAGCAGATTGCCTCCATGAAA | |
| | AATACGGTGGATTAAACAAAAGCAAGCCTTACTACACAGGGGAACAT | |
| | GCAAAGGCCATAGGAAATTGCCCAATATGGGTGAAAACACCCTTGAA | |
| | GCTGGCCAATGGAACCAAATATAGACCCCCTGCAAAACTATTAAAGG | |
| | AAAGAGGTTTCTTCGGAGCCATTGCTGGTTTCTTAGAGGGAGGATGG | |
| | GAAGGAATGATTGCAGGTTGGCACGGATACACATCCCATGGGGCAC | |
| | ATGGAGTAGCGGTGGCAGCTGACCTTAAGAGCACTCAAGAGGCCAT | |
| | AAACAAGATAACAAAAAATCTCAACTCTTTGAGTGAGCTGGAAGTAAA | |
| | GAATCTTCAAAGACTAAGCGGTGCCATGGATGAACTCCACAACGAAA | |
| | TACTAGAACTAGATGAGAAAGTGGATGATCTCAGAGCTGACACAATA | |
| | AGCTCACAAATAGAACTCGCAGTCCTGCTTTCCAATGAAGGAATAATA | |
| | AACAGTGAAGATGAACATCTCTTGGCGCTTGAAAGAAAGCTGAAGAA | |
| | AATGCTGGGCCCCTCTGCTGTAGAGATAGGGAATGGATGCTTTGAAA | |
| | CCAAACACAAGTGCAACCAGACCTGCCTCGACAGAATAGCTGCTGGT | |
| | ACCTTTGATGCAGGAGAATTTTCTCTCCCCACCTTTGATTCACTGAAT | |
| | ATTACTGCTGCATCTTTAAATGACGACGGATTGGACAATCATACTATA | |
| | CTGCTTTACTACTCAACTGCTGCCTCCAGTTTGGCTGTAACACTGATG | |
| | ATAGCTATCTTTGTTGTTTATATGGTCTCCAGAGACAATGTTTCTTGCT | |
| | CCATTTGTCTATAAGGAAAGTTAAGCCCTGTATTTTCCTTTATTGTAGT | |
| | GCTTGTTTGCTTGTTGTCATTACAAAGAAACGTTATTGAAAAATTGAT | |
| | GACTCGAGCTGGTACTGCATGCACGCAATGCTAGCTGCCCCTTTCCC | |
| | GTCCTGGGTACCCCGAGTCTCCCCCGACCTCGGGTCCCAGGTATGC | |
| | TCCCACCTCCACCTGCCCCACTCACCACCTCTGCTAGTTCCAGACAC | |
| | CTCCCAAGCACGCAGCAATGCAGCTCAAAACGCTTAGCCTAGCCACA | |
| | CCCCCACGGGAAACAGCAGTGATTAACCTTTAGCAATAAACGAAAGT | |
| | TTAACTAAGCTATACTAACCCCAGGGTTGGTCAATTTCGTGCCAGCC | |
| | ACACCCTGGAGCTAGCAAAAAAAA | |
| Pan-CoV-Flu | CTCGACATTGATTATTGACTAGTTATTAATAGTAATCAATTACGGGGT | 409 |
| Vaccine #21 | CATTAGTTCATAGCCCATATATGGAGTTCCGCGTTACATAACTTACGG | |
| CoV-Wuhan | TAAATGGCCCGCCTGGCTGACCGCCCAACGACCCCCGCCCATTGAC | |
| Spike(HexaPro)- | GTCAATAATGACGTATGTTCCCATAGTAACGCCAATAGGGACTTTCCA | |
| Influenza (HA) | TTGACGTCAATGGGTGGAGTATTTACGGTAAACTGCCCACTTGGCAG | |
| | TACATCAAGTGTATCATATGCCAAGTACGCCCCCTATTGACGTCAATG | |
| | ACGGTAAATGGCCCGCCTGGCATTATGCCCAGTACATGACCTTATGG | |
| | GACTTTCCTACTTGGCAGTACATCTACGTATTAGTCATCGCTATTACC | |
| | ATGGTCGAGGTGAGCCCCACGTTCTGCTTCACTCTCCCCATCTCCCC | |
| | CCCCTCCCCACCCCCAATTTTGTATTTATTTATTTTTTAATTATTTTGT | |
| | GCAGCGATGGGGGCGGGGGGGGGGGGGGGGCGCGCGCCAGGCG | |
| | GGGCGGGGCGGGGCGAGGGGCGGGGCGGGGCGAGGCGGAGAGG | |
| | TGCGGCGGCAGCCAATCAGAGCGGCGCGCTCCGAAAGTTTCCTTTT | |
| | ATGGCGAGGCGGCGGCGGCGGCGGCCCTATAAAAAGCGAAGCGCG | |
| | CGGCGGGCGGGAGTCGCTGCGCGCTGCCTTCGCCCCGTGCCCCGC | |
| | TCCGCCGCCGCCTCGCGCCGCCCGCCCCGGCTCTGACTGACCGCG | |
| | TTACTCCCACAGGTGAGCGGGCGGGACGGCCCTTCTCCTCCGGGCT | |
| | GTAATTAGCGCTTGGTTTAATGACGGCTTGTTTCTTTTCTGTGGCTGC | |
| | GTGAAAGCCTTGAGGGGCTCCGGGAGGGCCCTTTGTGCGGGGGGA | |
| | GCGGCTCGGGGGGTGCGTGCGTGTGTGTGTGCGTGGGGAGCGCCG | |
| | CGTGCGGCTCCGCGCTGCCCGGCGGCTGTGAGCGCTGCGGGCGCG | |
| | GCGCGGGGCTTTGTGCGCTCCGCAGTGTGCGCGAGGGGAGCGCGG | |
| | CCGGGGGCGGTGCCCCGCGGTGCGGGGGGGGCTGCGAGGGGAAC | |
| | AAAGGCTGCGTGCGGGGTGTGTGCGTGGGGGGGTGAGCAGGGGGT | |
| | GTGGGCGCGTCGGTCGGGCTGCAACCCCCCCTGCACCCCCCTCCC | |
| | CGAGTTGCTGAGCACGGCCCGGCTTCGGGTGCGGGGCTCCGTACG | |
| | GGGCGTGGCGCGGGGCTCGCCGTGCCGGGCGGGGGGTGGCGGCA | |
| | GGTGGGGGTGCCGGGCGGGGCGGGGCCGCCTCGGGCCGGGGAG | |
| | GGCTCGGGGGAGGGGCGCGGCGGCCCCCGGAGCGCCGGCGGCTG | |
| | TCGAGGCGCGGCGAGCCGCAGCCATTGCCTTTTATGGTAATCGTGC | |
| | GAGAGGGCGCAGGGACTTCCTTTGTCCCAAATCTGTGCGGAGCCGA | |
| | AATCTGGGAGGCGCCGCCGCACCCCCTCTAGCGGGCGCGGGGCGA | |
| | AGCGGTGCGGCGCCGGCAGGAAGGAAATGGGCGGGGAGGGCCTTC | |
| | GTGCGTCGCCGCGCCGCCGTCCCCTTCTCCCTCTCCAGCCTCGGGG | |
| | CTGTCCGCGGGGGGACGGCTGCCTTCGGGGGGGACGGGGCAGGG | |
| | CGGGGTTCGGCTTCTGGCGTGTGACCGGCGGCTCTAGAGCCTCTGC | |
| | TAACCATGTTCATGCCTTCTTCTTTTTCCTACAGCTCCTGGGCAACGT | |
| | GCTGGTTATTGTGCTGTCTCATCATTTTGGCAAAGAATTGGAGAATAA | |
| | ACTAGTATTCTTCTGGTCCCCACAGACTCAGAGAGAACCCGCCACCA | |
| | TGTTCGTGTTCCTGGTGCTGCTGCCCCTGGTGAGCAGCCAGTGCGT | |
| | GAACCTGACCACCAGGACCCAGCTGCCCCCCGCCTACACCAACAGC | |
| | TTCACCAGGGGCGTGTACTACCCCGACAAGGTGTTCAGGAGCAGCG | |
| | TGCTGCACAGCACCCAGGACCTGTTCCTGCCCTTCTTCAGCAACGTG | |
| | ACCTGGTTCCACGCCATCCACGTGAGCGGCACCAACGGCACCAAGA | |
| | GGTTCGACAACCCCGTGCTGCCCTTCAACGACGGCGTGTACTTCGC | |
| | CAGCACCGAGAAGAGCAACATCATCAGGGGCTGGATCTTCGGCACC | |
| | ACCCTGGACAGCAAGACCCAGAGCCTGCTGATCGTGAACAACGCCA | |
| | CCAACGTGGTGATCAAGGTGTGCGAGTTCCAGTTCTGCAACGACCC | |
| | CTTCCTGGGCGTGTACTACCACAAGAACAACAAGAGCTGGATGGAGA | |
| | GCGAGTTCAGGGTGTACAGCAGCGCCAACAACTGCACCTTCGAGTA | |
| | CGTGAGCCAGCCCTTCCTGATGGACCTGGAGGGCAAGCAGGGCAAC | |
| | TTCAAGAACCTGAGGGAGTTCGTGTTCAAGAACATCGACGGCTACTT | |
| | CAAGATCTACAGCAAGCACACCCCCATCAACCTGGTGAGGGACCTG | |
| | CCCCAGGGCTTCAGCGCCCTGGAGCCCCTGGTGGACCTGCCCATCG | |
| | GCATCAACATCACCAGGTTCCAGACCCTGCTGGCCCTGCACAGGAG | |
| | CTACCTGACCCCCGGCGACAGCAGCAGCGGCTGGACCGCCGGCGC | |
| | CGCCGCCTACTACGTGGGCTACCTGCAGCCCAGGACCTTCCTGCTG | |
| | AAGTACAACGAGAACGGCACCATCACCGACGCCGTGGACTGCGCCC | |
| | TGGACCCCCTGAGCGAGACCAAGTGCACCCTGAAGAGCTTCACCGT | |
| | GGAGAAGGGCATCTACCAGACCAGCAACTTCAGGGTGCAGCCCACC | |
| | GAGAGCATCGTGAGGTTCCCCAACATCACCAACCTGTGCCCCTTCG | |
| | GCGAGGTGTTCAACGCCACCAGGTTCGCCAGCGTGTACGCCTGGAA | |
| | CAGGAAGAGGATCAGCAACTGCGTGGCCGACTACAGCGTGCTGTAC | |
| | AACAGCGCCAGCTTCAGCACCTTCAAGTGCTACGGCGTGAGCCCCA | |
| | CCAAGCTGAACGACCTGTGCTTCACCAACGTGTACGCCGACAGCTTC | |
| | GTGATCAGGGGCGACGAGGTGAGGCAGATCGCCCCCGGCCAGACC | |
| | GGCAAGATCGCCGACTACAACTACAAGCTGCCCGACGACTTCACCG | |
| | GCTGCGTGATCGCCTGGAACAGCAACAACCTGGACAGCAAGGTGGG | |
| | CGGCAACTACAACTACCTGTACAGGCTGTTCAGGAAGAGCAACCTGA | |
| | AGCCCTTCGAGAGGGACATCAGCACCGAGATCTACCAGGCCGGCAG | |
| | CACCCCCTGCAACGGCGTGGAGGGCTTCAACTGCTACTTCCCCCTG | |
| | CAGAGCTACGGCTTCCAGCCCACCAACGGCGTGGGCTACCAGCCCT | |
| | ACAGGGTGGTGGTGCTGAGCTTCGAGCTGCTGCACGCCCCCGCCAC | |
| | CGTGTGCGGCCCCAAGAAGAGCACCAACCTGGTGAAGAACAAGTGC | |
| | GTGAACTTCAACTTCAACGGCCTGACCGGCACCGGCGTGCTGACCG | |
| | AGAGCAACAAGAAGTTCCTGCCCTTCCAGCAGTTCGGCAGGGACAT | |
| | CGCCGACACCACCGACGCCGTGAGGGACCCCCAGACCCTGGAGAT | |
| | CCTGGACATCACCCCCTGCAGCTTCGGCGGCGTGAGCGTGATCACC | |
| | CCCGGCACCAACACCAGCAACCAGGTGGCCGTGCTGTACCAGGACG | |
| | TGAACTGCACCGAGGTGCCCGTGGCCATCCACGCCGACCAGCTGAC | |
| | CCCCACCTGGAGGGTGTACAGCACCGGCAGCAACGTGTTCCAGACC | |
| | AGGGCCGGCTGCCTGATCGGCGCCGAGCACGTGAACAACAGCTAC | |
| | GAGTGCGACATCCCCATCGGCGCCGGCATCTGCGCCAGCTACCAGA | |
| | CCCAGACCAACAGCCCCGGCAGCGCCAGCAGCGTGGCCAGCCAGA | |
| | GCATCATCGCCTACACCATGAGCCTGGGCGCCGAGAACAGCGTGGC | |
| | CTACAGCAACAACAGCATCGCCATCCCCACCAACTTCACCATCAGCG | |
| | TGACCACCGAGATCCTGCCCGTGAGCATGACCAAGACCAGCGTGGA | |
| | CTGCACCATGTACATCTGCGGCGACAGCACCGAGTGCAGCAACCTG | |
| | CTGCTGCAGTACGGCAGCTTCTGCACCCAGCTGAACAGGGCCCTGA | |
| | CCGGCATCGCCGTGGAGCAGGACAAGAACACCCAGGAGGTGTTCGC | |
| | CCAGGTGAAGCAGATCTACAAGACCCCCCCCATCAAGGACTTCGGC | |
| | GGCTTCAACTTCAGCCAGATCCTGCCCGACCCCAGCAAGCCCAGCA | |
| | AGAGGAGCCCCATCGAGGACCTGCTGTTCAACAAGGTGACCCTGGC | |
| | CGACGCCGGCTTCATCAAGCAGTACGGCGACTGCCTGGGCGACATC | |
| | GCCGCCAGGGACCTGATCTGCGCCCAGAAGTTCAACGGCCTGACCG | |
| | TGCTGCCCCCCCTGCTGACCGACGAGATGATCGCCCAGTACACCAG | |
| | CGCCCTGCTGGCCGGCACCATCACCAGCGGCTGGACCTTCGGCGC | |
| | CGGCCCCGCCCTGCAGATCCCCTTCCCCATGCAGATGGCCTACAGG | |
| | TTCAACGGCATCGGCGTGACCCAGAACGTGCTGTACGAGAACCAGA | |
| | AGCTGATCGCCAACCAGTTCAACAGCGCCATCGGCAAGATCCAGGA | |
| | CAGCCTGAGCAGCACCCCCAGCGCCCTGGGCAAGCTGCAGGACGT | |
| | GGTGAACCAGAACGCCCAGGCCCTGAACACCCTGGTGAAGCAGCTG | |
| | AGCAGCAACTTCGGCGCCATCAGCAGCGTGCTGAACGACATCCTGA | |
| | GCAGGCTGGACCCCCCCGAGGCCGAGGTGCAGATCGACAGGCTGA | |
| | TCACCGGCAGGCTGCAGAGCCTGCAGACCTACGTGACCCAGCAGCT | |
| | GATCAGGGCCGCCGAGATCAGGGCCAGCGCCAACCTGGCCGCCAC | |
| | CAAGATGAGCGAGTGCGTGCTGGGCCAGAGCAAGAGGGTGGACTTC | |
| | TGCGGCAAGGGCTACCACCTGATGAGCTTCCCCCAGAGCGCCCCCC | |
| | ACGGCGTGGTGTTCCTGCACGTGACCTACGTGCCCGCCCAGGAGAA | |
| | GAACTTCACCACCGCCCCCGCCATCTGCCACGACGGCAAGGCCCAC | |
| | TTCCCCAGGGAGGGCGTGTTCGTGAGCAACGGCACCCACTGGTTCG | |
| | TGACCCAGAGGAACTTCTACGAGCCCCAGATCATCACCACCGACAAC | |
| | ACCTTCGTGAGCGGCAACTGCGACGTGGTGATCGGCATCGTGAACA | |
| | ACACCGTGTACGACCCCCTGCAGCCCGAGCTGGACAGCTTCAAGGA | |
| | GGAGCTGGACAAGTACTTCAAGAACCACACCAGCCCCGACGTGGAC | |
| | CTGGGCGACATCAGCGGCATCAACGCCAGCGTGGTGAACATCCAGA | |
| | AGGAGATCGACAGGCTGAACGAGGTGGCCAAGAACCTGAACGAGAG | |
| | CCTGATCGACCTGCAGGAGCTGGGCAAGTACGAGCAGTACATCAAG | |
| | TGGCCCTGGTACATCTGGCTGGGCTTCATCGCCGGCCTGATCGCCA | |
| | TCGTGATGGTGACCATCATGCTGTGCTGCATGACCAGCTGCTGCAGC | |
| | TGCCTGAAGGGCTGCTGCAGCTGCGGCAGCTGCTGCAAGTTCGACG | |
| | AGGACGACAGCGAGCCCGTGCTGAAGGGCGTGAAGCTGCACTACAC | |
| | CGGAAGCGGAGCCACGAACTTCTCTCTGTTAAAGCAAGCAGGAGAT | |
| | GTTGAAGAAAACCCCGGGCCTATGAAGGCAATACTAGTAGTTCTGCT | |
| | ATATACATTTGCAACCGCAAATGCAGACACATTATGTATAGGTTATCA | |
| | TGCGAACAACTCAACAGACACTGTAGACACAGTACTAGAAAAGAATG | |
| | TAACAGTAACACACTCTGTTAACCTTCTAGAAGACAAGCATAACGGGA | |
| | AACTATGCAAACTAAGAGGGGTAGCCCCATTGCATTTGGGTAAATGT | |
| | AACATTGCTGGCTGGATCCTGGGAAATCCAGAGTGTGAATCACTCTC | |
| | CACAGCAAGCTCATGGTCCTACATTGTGGAAACATCTAGTTCAGACA | |
| | ATGGAACGTGTTACCCAGGAGATTTCATCGATTATGAGGAGCTAAGA | |
| | GAGCAATTGAGCTCAGTGTCATCATTTGAAAGGTTTGAGATATTCCCC | |
| | AAGACAAGTTCATGGCCCAATCATGACTCGAACAAAGGTGTAACGAC | |
| | AGCATGTCCTCATGCTGGAGCAAAAAGCTTCTACAAAAATTTAATATG | |
| | GCTAGTTAAAAAAGGAAATTCATACCCAAAGCTCAGCAAATCCTACAT | |
| | TAATGATAAAGGGAAAGAAGTCCTCGTGCTATGGGGCATTCACCATC | |
| | CACCTACTAGTGCTGACCAACAAAGTCTCTATCAGAATGCAGATGCA | |
| | TATGTTTTTGTGGGGACATCAAGATACAGCAAGAAGTTCAAGCCGGA | |
| | AATAGCAATAAGGCCCAAAGTGAGGGATCAAGAAGGGAGAATGAACT | |
| | ATTACTGGACACTAGTAGAGCCGGGAGACAAAATAACATTCGAAGCA | |
| | ACTGGAAATCTAGTGGTACCGAGATATGCATTCGCAATGGAAAGAAA | |
| | TGCTGGATCTGGTATTATCATTTCAGATACACCAGTCCACGATTGCAA | |
| | TACAACTTGTCAGACACCCAAGGGTGCTATAAACACCAGCCTCCCAT | |
| | TTCAGAACATACATCCGATCACAATTGGAAAATGTCCAAAATATGTAA | |
| | AAAGCACAAAATTGAGACTGGCCACAGGATTGAGGAATGTCCCGTCC | |
| | ATTCAATCTAGAGGCCTATTTGGGGCCATTGCCGGTTTCATTGAAGG | |
| | GGGGTGGACAGGGATGGTAGATGGATGGTACGGTTATCACCATCAA | |
| | AATGAGCAGGGGTCAGGATATGCAGCCGACCTGAAGAGCACACAGA | |
| | ATGCCATTGACGAGATTACTAACAAAGTAAACTCTGTTATTGAAAAAA | |
| | TGAATACACAGTTCACAGCAGTAGGTAAAGAGTTCAACCACCTGGAA | |
| | AAAAGAATAGAGAATTTAAATAAAAAAGTTGATGATGGTTTCCTGGAC | |
| | ATTTGGACTTACAATGCCGAACTGTTGGTTCTATTGGAAAATGAAAGA | |
| | ACTTTGGACTACCACGATTCAAAGGTGAAGAACTTATATGAAAAGGTA | |
| | AGAAGCCAGTTAAAAAACAATGCCAAGGAAATTGGAAACGGCTGCTT | |
| | TGAATTTTACCACAAATGTGATAACACGTGCATGGAAAGTGTCAAAAA | |
| | TGGGACTTATGACTACCCAAAATACTCAGAGGAAGCAAAATTAAACA | |
| | GAGAAGAAATAGATGGGGTAAAGCTGGAATCAACAAGGATTTACCAG | |
| | ATTTTGGCGATCTATTCAACCGTCGCCAGTTCATTGGTACTGGTAGTC | |
| | TCCCTGGGGGCAATCAGTTTCTGGATGTGCTCTAATGGGTCTCTACA | |
| | GTGTAGAATATGTATTTAAGGAAGCGGAGCCACGAACTTCTCTCTGTT | |
| | AAAGCAAGCAGGAGATGTTGAAGAAAACCCCGGGCCTAGCAAAAGC | |
| | AGGGGATAATTCTATTAACCATGAAGACTATCATTGCTTTGAGCTACA | |
| | TTCTATGTCTGGTTTTCGCTCAAAAACTTCCTGGAAATGACAATAGCA | |
| | CTGCAACGCTGTGCCTTGGGCACCATGCAGTACCAAACGGAACGAT | |
| | AGTGAAAACAATCACGAATGACCAAATTGAAGTTACTAATGCTACTGA | |
| | GCTGGTTCAGAATTCCTCAATAGGTGAAATATGCGACAGTCCTCATC | |
| | AGATCCTTGATGGAGAAAACTGCACACTAATAGATGCTCTATTGGGA | |
| | GACCCTCAGTGTGATGGCTTTCAAAATAAGAAATGGGACCTTTTTGTT | |
| | GAACGAAGCAAAGCCTACAGCAACTGTTACCCTTATGATGTGCCGGA | |
| | TTATGCCTCCCTTAGGTCACTAGTTGCCTCATCCGGCACACTGGAGT | |
| | TTAACAATGAAAGCTTCAATTGGGCTGGAGTCACTCAAAACGGAACA | |
| | AGTTCTGCTTGCATAAGGGGATCTAATAGTAGTTTCTTTAGTAGATTA | |
| | AATTGGTTGACCCACTTAAACTTCAAGTACCCAGCATTGAACGTGACT | |
| | ATGCCAAACAATGAACAATTTGACAAATTGTACATTTGGGGGGTTCAC | |
| | CACCCGGGTACGGACAAGGACCAAATCTTCCTGTATGCTCAATCATC | |
| | AGGAAGAATCACAGTATCTACCAAAAGAAGCCAACAAGCTGTAATCC | |
| | CGAATATCGGATCTAGACCCAGAATAAGGAATATCCCTAGCAGAATA | |
| | AGCATCTATTGGACAATAGTAAAACCGGGAGACATACTTTTGATTAAC | |
| | AGCACAGGGAATCTAATTGCTCCTAGGGGTTACTTCAAAATACGAAG | |
| | TGGGAAAAGCTCAATAATGAGATCAGATGCACCCATTGGCAAATGCA | |
| | AGTCTGAATGCATCACTCCAAATGGAAGCATTCCCAATGACAAACCAT | |
| | TCCAAAATGTAAACAGGATCACATACGGGGCCTGTCCCAGATATGTT | |
| | AAGCAAAGCACTCTGAAATTGGCAACAGGAATGCGAAATGTACCAGA | |
| | GAAACAAACTAGAGGCATATTTGGCGCAATAGCGGGTTTCATAGAAA | |
| | ATGGTTGGGAGGGAATGGTGGATGGTTGGTACGGTTTCAGGCATCA | |
| | AAATTCTGAGGGAAGAGGACAAGCAGCAGATCTCAAAAGCACTCAAG | |
| | CAGCAATCGATCAAATCAATGGGAAGCTGAATCGATTGATCGGGAAA | |
| | ACCAACGAGAAATTCCATCAGATTGAGAAAGAATTCTCAGAAGTAGAA | |
| | GGGAGAATTCAGGACCTTGAGAAATATGTTGAGGACACAAAAATAGA | |
| | TCTCTGGTCATACAACGCAGAGCTTCTTGTTGCCCTGGAAAACCAAC | |
| | ATACAATTGATCTAACTGACTCAGAAATGAACAAACTGTTTGAAAAAA | |
| | CAAAGAAGCAACTGAGGGAAAATGCTGAGGATATGGGCAATGGTTGT | |
| | TTCAAAATATACCACAAATGTGACAATGCCTGCATAGGATCAATCAGA | |
| | AATGGAACTTATGACCACGATGTATACAGGGATGAAGCATTAAACAA | |
| | CCGGTTCCAGATCAAGGGAGTTGAGCTGAAGTCAGGGTACAAAGATT | |
| | GGATCCTATGGATTTCCTTTGCCATATCATGTTTTTTGCTTTGTGTTGC | |
| | TTTGTTGGGGTTCATCATGTGGGCCTGCCAAAAGGGCAACATTAGGT | |
| | GCAACATTTGCATTTGAGTGCATTAATTAAAAACACCCTTGTTTCTACT | |
| | GGAAGCGGAGCCACGAACTTCTCTCTGTTAAAGCAAGCAGGAGATGT | |
| | TGAAGAAAACCCCGGGCCTATTTTGTAATATCCACAAAATGAAGGCAA | |
| | TAATTGTACTACTCATGGTAGTAACATCCAATGCAGATCGAATCTGCA | |
| | CTGGGATAACATCGTCAAACTCACCACATGTCGTCAAAACTGCTACT | |
| | CAAGGGGAGGTCAACGTGACCGGTGTAATACCACTGACAACAACAC | |
| | CCACCAAATCTCATTTTGCAAATCTCAAAGGAACAGAAACCAGGGGG | |
| | AAACTATGCCCAAAATGCCTCAACTGCACAGATCTGGATGTAGCCTT | |
| | GGGCAGACCAAAATGCACAGGGAAAATACCCTCTGCAAGGGTTTCAA | |
| | TACTCCATGAAGTCAGACCTGTTACATCTGGGTGCTTTCCTATAATGC | |
| | ACGATAGAACAAAAATTAGACAGCTGCCTAACCTTCTCCGAGGATAC | |
| | GAACATGTCAGGTTATCAACTCACAACGTTATCAATGCAAAAGATGCA | |
| | CCAGGAAGACCCTACGAAATTGGAACCTCAGGGTCTTGCCCTAACAT | |
| | TACCAATGGAAACGGATTCTTCGCAACAATGGCTTGGGCCGTCCCAA | |
| | AAAACAAAACAGCAACAAATCCATTAAGAATAGAAGTACCATACATTT | |
| | GTACAGAAGGAGAAGACCAAATTACCGTTTGGGGGTTCCACTCTGAC | |
| | AACGAGACCCAAATGGCAAAGCTCTATGGGGACTCAAAGCCCCAGA | |
| | AGTTCACCTCATCTGCCAACGGAGTGACCACACATTACGTTTCACAG | |
| | ATTGGTGGCTTCCCAAATCAAACAGAAGACGGAGGACTACCACAAAG | |
| | TGGCAGAATTGTTGTTGATTACATGGTGCAGAAATCTGGAAAAACAG | |
| | GAACAATTACCTATCAAAGAGGTATTTTATTGCCTCAAAAAGTGTGGT | |
| | GCGCAAGTGGCAGGAGCAAGGTAATAAAAGGATCCTTGCCCTTAATT | |
| | GGAGAAGCAGATTGCCTCCATGAAAAATACGGTGGATTAAACAAAAG | |
| | CAAGCCTTACTACACAGGGGAACATGCAAAGGCCATAGGAAATTGCC | |
| | CAATATGGGTGAAAACACCCTTGAAGCTGGCCAATGGAACCAAATAT | |
| | AGACCCCCTGCAAAACTATTAAAGGAAAGAGGTTTCTTCGGAGCCAT | |
| | TGCTGGTTTCTTAGAGGGAGGATGGGAAGGAATGATTGCAGGTTGG | |
| | CACGGATACACATCCCATGGGGCACATGGAGTAGCGGTGGCAGCTG | |
| | ACCTTAAGAGCACTCAAGAGGCCATAAACAAGATAACAAAAAATCTCA | |
| | ACTCTTTGAGTGAGCTGGAAGTAAAGAATCTTCAAAGACTAAGCGGT | |
| | GCCATGGATGAACTCCACAACGAAATACTAGAACTAGATGAGAAAGT | |
| | GGATGATCTCAGAGCTGACACAATAAGCTCACAAATAGAACTCGCAG | |
| | TCCTGCTTTCCAATGAAGGAATAATAAACAGTGAAGATGAACATCTCT | |
| | TGGCGCTTGAAAGAAAGCTGAAGAAAATGCTGGGCCCCTCTGCTGTA | |
| | GAGATAGGGAATGGATGCTTTGAAACCAAACACAAGTGCAACCAGAC | |
| | CTGCCTCGACAGAATAGCTGCTGGTACCTTTGATGCAGGAGAATTTT | |
| | CTCTCCCCACCTTTGATTCACTGAATATTACTGCTGCATCTTTAAATG | |
| | ACGACGGATTGGACAATCATACTATACTGCTTTACTACTCAACTGCTG | |
| | CCTCCAGTTTGGCTGTAACACTGATGATAGCTATCTTTGTTGTTTATA | |
| | TGGTCTCCAGAGACAATGTTTCTTGCTCCATTTGTCTATAAGGAAAGT | |
| | TAAGCCCTGTATTTTCCTTTATTGTAGTGCTTGTTTGCTTGTTGTCATT | |
| | ACAAAGAAACGTTATTGAAAAATTGATGACTCGAGCTGGTACTGCATG | |
| | CACGCAATGCTAGCTGCCCCTTTCCCGTCCTGGGTACCCCGAGTCTC | |
| | CCCCGACCTCGGGTCCCAGGTATGCTCCCACCTCCACCTGCCCCAC | |
| | TCACCACCTCTGCTAGTTCCAGACACCTCCCAAGCACGCAGCAATGC | |
| | AGCTCAAAACGCTTAGCCTAGCCACACCCCCACGGGAAACAGCAGT | |
| | GATTAACCTTTAGCAATAAACGAAAGTTTAACTAAGCTATACTAACCC | |
| | CAGGGTTGGTCAATTTCGTGCCAGCCACACCCTGGAGCTAGCAAAAA | |
| | AAA | |
| Pan-CoV-Flu | CTCGACATTGATTATTGACTAGTTATTAATAGTAATCAATTACGGGGT | 410 |
| Vaccine #22 | CATTAGTTCATAGCCCATATATGGAGTTCCGCGTTACATAACTTACGG | |
| CoV-Wuhan | TAAATGGCCCGCCTGGCTGACCGCCCAACGACCCCCGCCCATTGAC | |
| Spike(2 proline | GTCAATAATGACGTATGTTCCCATAGTAACGCCAATAGGGACTTTCCA | |
| substitution)- | TTGACGTCAATGGGTGGAGTATTTACGGTAAACTGCCCACTTGGCAG | |
| Influenza (HA) | TACATCAAGTGTATCATATGCCAAGTACGCCCCCTATTGACGTCAATG | |
| | ACGGTAAATGGCCCGCCTGGCATTATGCCCAGTACATGACCTTATGG | |
| | GACTTTCCTACTTGGCAGTACATCTACGTATTAGTCATCGCTATTACC | |
| | ATGGTCGAGGTGAGCCCCACGTTCTGCTTCACTCTCCCCATCTCCCC | |
| | CCCCTCCCCACCCCCAATTTTGTATTTATTTATTTTTTAATTATTTTGT | |
| | GCAGCGATGGGGGCGGGGGGGGGGGGGGGGCGCGCGCCAGGCG | |
| | GGGCGGGGCGGGGCGAGGGGCGGGGCGGGGCGAGGCGGAGAGG | |
| | TGCGGCGGCAGCCAATCAGAGCGGCGCGCTCCGAAAGTTTCCTTTT | |
| | ATGGCGAGGCGGCGGCGGCGGCGGCCCTATAAAAAGCGAAGCGCG | |
| | CGGCGGGCGGGAGTCGCTGCGCGCTGCCTTCGCCCCGTGCCCCGC | |
| | TCCGCCGCCGCCTCGCGCCGCCCGCCCCGGCTCTGACTGACCGCG | |
| | TTACTCCCACAGGTGAGCGGGCGGGACGGCCCTTCTCCTCCGGGCT | |
| | GTAATTAGCGCTTGGTTTAATGACGGCTTGTTTCTTTTCTGTGGCTGC | |
| | GTGAAAGCCTTGAGGGGCTCCGGGAGGGCCCTTTGTGCGGGGGGA | |
| | GCGGCTCGGGGGGTGCGTGCGTGTGTGTGTGCGTGGGGAGCGCCG | |
| | CGTGCGGCTCCGCGCTGCCCGGCGGCTGTGAGCGCTGCGGGCGCG | |
| | GCGCGGGGCTTTGTGCGCTCCGCAGTGTGCGCGAGGGGAGCGCGG | |
| | CCGGGGGCGGTGCCCCGCGGTGCGGGGGGGGCTGCGAGGGGAAC | |
| | AAAGGCTGCGTGCGGGGTGTGTGCGTGGGGGGGTGAGCAGGGGGT | |
| | GTGGGCGCGTCGGTCGGGCTGCAACCCCCCCTGCACCCCCCTCCC | |
| | CGAGTTGCTGAGCACGGCCCGGCTTCGGGTGCGGGGCTCCGTACG | |
| | GGGCGTGGCGCGGGGCTCGCCGTGCCGGGCGGGGGGTGGCGGCA | |
| | GGTGGGGGTGCCGGGCGGGGCGGGGCCGCCTCGGGCCGGGGAG | |
| | GGCTCGGGGGAGGGGCGCGGCGGCCCCCGGAGCGCCGGCGGCTG | |
| | TCGAGGCGCGGCGAGCCGCAGCCATTGCCTTTTATGGTAATCGTGC | |
| | GAGAGGGCGCAGGGACTTCCTTTGTCCCAAATCTGTGCGGAGCCGA | |
| | AATCTGGGAGGCGCCGCCGCACCCCCTCTAGCGGGCGCGGGGCGA | |
| | AGCGGTGCGGCGCCGGCAGGAAGGAAATGGGCGGGGAGGGCCTTC | |
| | GTGCGTCGCCGCGCCGCCGTCCCCTTCTCCCTCTCCAGCCTCGGGG | |
| | CTGTCCGCGGGGGGACGGCTGCCTTCGGGGGGGACGGGGCAGGG | |
| | CGGGGTTCGGCTTCTGGCGTGTGACCGGCGGCTCTAGAGCCTCTGC | |
| | TAACCATGTTCATGCCTTCTTCTTTTTCCTACAGCTCCTGGGCAACGT | |
| | GCTGGTTATTGTGCTGTCTCATCATTTTGGCAAAGAATTGGAGAATAA | |
| | ACTAGTATTCTTCTGGTCCCCACAGACTCAGAGAGAACCCGCCACCA | |
| | TGTTCGTGTTCCTGGTGCTGCTGCCCCTGGTGAGCAGCCAGTGCGT | |
| | GAACCTGACCACCAGGACCCAGCTGCCCCCCGCCTACACCAACAGC | |
| | TTCACCAGGGGCGTGTACTACCCCGACAAGGTGTTCAGGAGCAGCG | |
| | TGCTGCACAGCACCCAGGACCTGTTCCTGCCCTTCTTCAGCAACGTG | |
| | ACCTGGTTCCACGCCATCCACGTGAGCGGCACCAACGGCACCAAGA | |
| | GGTTCGACAACCCCGTGCTGCCCTTCAACGACGGCGTGTACTTCGC | |
| | CAGCACCGAGAAGAGCAACATCATCAGGGGCTGGATCTTCGGCACC | |
| | ACCCTGGACAGCAAGACCCAGAGCCTGCTGATCGTGAACAACGCCA | |
| | CCAACGTGGTGATCAAGGTGTGCGAGTTCCAGTTCTGCAACGACCC | |
| | CTTCCTGGGCGTGTACTACCACAAGAACAACAAGAGCTGGATGGAGA | |
| | GCGAGTTCAGGGTGTACAGCAGCGCCAACAACTGCACCTTCGAGTA | |
| | CGTGAGCCAGCCCTTCCTGATGGACCTGGAGGGCAAGCAGGGCAAC | |
| | TTCAAGAACCTGAGGGAGTTCGTGTTCAAGAACATCGACGGCTACTT | |
| | CAAGATCTACAGCAAGCACACCCCCATCAACCTGGTGAGGGACCTG | |
| | CCCCAGGGCTTCAGCGCCCTGGAGCCCCTGGTGGACCTGCCCATCG | |
| | GCATCAACATCACCAGGTTCCAGACCCTGCTGGCCCTGCACAGGAG | |
| | CTACCTGACCCCCGGCGACAGCAGCAGCGGCTGGACCGCCGGCGC | |
| | CGCCGCCTACTACGTGGGCTACCTGCAGCCCAGGACCTTCCTGCTG | |
| | AAGTACAACGAGAACGGCACCATCACCGACGCCGTGGACTGCGCCC | |
| | TGGACCCCCTGAGCGAGACCAAGTGCACCCTGAAGAGCTTCACCGT | |
| | GGAGAAGGGCATCTACCAGACCAGCAACTTCAGGGTGCAGCCCACC | |
| | GAGAGCATCGTGAGGTTCCCCAACATCACCAACCTGTGCCCCTTCG | |
| | GCGAGGTGTTCAACGCCACCAGGTTCGCCAGCGTGTACGCCTGGAA | |
| | CAGGAAGAGGATCAGCAACTGCGTGGCCGACTACAGCGTGCTGTAC | |
| | AACAGCGCCAGCTTCAGCACCTTCAAGTGCTACGGCGTGAGCCCCA | |
| | CCAAGCTGAACGACCTGTGCTTCACCAACGTGTACGCCGACAGCTTC | |
| | GTGATCAGGGGCGACGAGGTGAGGCAGATCGCCCCCGGCCAGACC | |
| | GGCAAGATCGCCGACTACAACTACAAGCTGCCCGACGACTTCACCG | |
| | GCTGCGTGATCGCCTGGAACAGCAACAACCTGGACAGCAAGGTGGG | |
| | CGGCAACTACAACTACCTGTACAGGCTGTTCAGGAAGAGCAACCTGA | |
| | AGCCCTTCGAGAGGGACATCAGCACCGAGATCTACCAGGCCGGCAG | |
| | CACCCCCTGCAACGGCGTGGAGGGCTTCAACTGCTACTTCCCCCTG | |
| | CAGAGCTACGGCTTCCAGCCCACCAACGGCGTGGGCTACCAGCCCT | |
| | ACAGGGTGGTGGTGCTGAGCTTCGAGCTGCTGCACGCCCCCGCCAC | |
| | CGTGTGCGGCCCCAAGAAGAGCACCAACCTGGTGAAGAACAAGTGC | |
| | GTGAACTTCAACTTCAACGGCCTGACCGGCACCGGCGTGCTGACCG | |
| | AGAGCAACAAGAAGTTCCTGCCCTTCCAGCAGTTCGGCAGGGACAT | |
| | CGCCGACACCACCGACGCCGTGAGGGACCCCCAGACCCTGGAGAT | |
| | CCTGGACATCACCCCCTGCAGCTTCGGCGGCGTGAGCGTGATCACC | |
| | CCCGGCACCAACACCAGCAACCAGGTGGCCGTGCTGTACCAGGACG | |
| | TGAACTGCACCGAGGTGCCCGTGGCCATCCACGCCGACCAGCTGAC | |
| | CCCCACCTGGAGGGTGTACAGCACCGGCAGCAACGTGTTCCAGACC | |
| | AGGGCCGGCTGCCTGATCGGCGCCGAGCACGTGAACAACAGCTAC | |
| | GAGTGCGACATCCCCATCGGCGCCGGCATCTGCGCCAGCTACCAGA | |
| | CCCAGACCAACAGCCCCAGGAGGGCCAGGAGCGTGGCCAGCCAGA | |
| | GCATCATCGCCTACACCATGAGCCTGGGCGCCGAGAACAGCGTGGC | |
| | CTACAGCAACAACAGCATCGCCATCCCCACCAACTTCACCATCAGCG | |
| | TGACCACCGAGATCCTGCCCGTGAGCATGACCAAGACCAGCGTGGA | |
| | CTGCACCATGTACATCTGCGGCGACAGCACCGAGTGCAGCAACCTG | |
| | CTGCTGCAGTACGGCAGCTTCTGCACCCAGCTGAACAGGGCCCTGA | |
| | CCGGCATCGCCGTGGAGCAGGACAAGAACACCCAGGAGGTGTTCGC | |
| | CCAGGTGAAGCAGATCTACAAGACCCCCCCCATCAAGGACTTCGGC | |
| | GGCTTCAACTTCAGCCAGATCCTGCCCGACCCCAGCAAGCCCAGCA | |
| | AGAGGAGCTTCATCGAGGACCTGCTGTTCAACAAGGTGACCCTGGC | |
| | CGACGCCGGCTTCATCAAGCAGTACGGCGACTGCCTGGGCGACATC | |
| | GCCGCCAGGGACCTGATCTGCGCCCAGAAGTTCAACGGCCTGACCG | |
| | TGCTGCCCCCCCTGCTGACCGACGAGATGATCGCCCAGTACACCAG | |
| | CGCCCTGCTGGCCGGCACCATCACCAGCGGCTGGACCTTCGGCGC | |
| | CGGCGCCGCCCTGCAGATCCCCTTCGCCATGCAGATGGCCTACAGG | |
| | TTCAACGGCATCGGCGTGACCCAGAACGTGCTGTACGAGAACCAGA | |
| | AGCTGATCGCCAACCAGTTCAACAGCGCCATCGGCAAGATCCAGGA | |
| | CAGCCTGAGCAGCACCGCCAGCGCCCTGGGCAAGCTGCAGGACGT | |
| | GGTGAACCAGAACGCCCAGGCCCTGAACACCCTGGTGAAGCAGCTG | |
| | AGCAGCAACTTCGGCGCCATCAGCAGCGTGCTGAACGACATCCTGA | |
| | GCAGGCTGGACCCCCCCGAGGCCGAGGTGCAGATCGACAGGCTGA | |
| | TCACCGGCAGGCTGCAGAGCCTGCAGACCTACGTGACCCAGCAGCT | |
| | GATCAGGGCCGCCGAGATCAGGGCCAGCGCCAACCTGGCCGCCAC | |
| | CAAGATGAGCGAGTGCGTGCTGGGCCAGAGCAAGAGGGTGGACTTC | |
| | TGCGGCAAGGGCTACCACCTGATGAGCTTCCCCCAGAGCGCCCCCC | |
| | ACGGCGTGGTGTTCCTGCACGTGACCTACGTGCCCGCCCAGGAGAA | |
| | GAACTTCACCACCGCCCCCGCCATCTGCCACGACGGCAAGGCCCAC | |
| | TTCCCCAGGGAGGGCGTGTTCGTGAGCAACGGCACCCACTGGTTCG | |
| | TGACCCAGAGGAACTTCTACGAGCCCCAGATCATCACCACCGACAAC | |
| | ACCTTCGTGAGCGGCAACTGCGACGTGGTGATCGGCATCGTGAACA | |
| | ACACCGTGTACGACCCCCTGCAGCCCGAGCTGGACAGCTTCAAGGA | |
| | GGAGCTGGACAAGTACTTCAAGAACCACACCAGCCCCGACGTGGAC | |
| | CTGGGCGACATCAGCGGCATCAACGCCAGCGTGGTGAACATCCAGA | |
| | AGGAGATCGACAGGCTGAACGAGGTGGCCAAGAACCTGAACGAGAG | |
| | CCTGATCGACCTGCAGGAGCTGGGCAAGTACGAGCAGTACATCAAG | |
| | TGGCCCTGGTACATCTGGCTGGGCTTCATCGCCGGCCTGATCGCCA | |
| | TCGTGATGGTGACCATCATGCTGTGCTGCATGACCAGCTGCTGCAGC | |
| | TGCCTGAAGGGCTGCTGCAGCTGCGGCAGCTGCTGCAAGTTCGACG | |
| | AGGACGACAGCGAGCCCGTGCTGAAGGGCGTGAAGCTGCACTACAC | |
| | CGGAAGCGGAGCCACGAACTTCTCTCTGTTAAAGCAAGCAGGAGAT | |
| | GTTGAAGAAAACCCCGGGCCTATGAAGGCAATACTAGTAGTTCTGCT | |
| | ATATACATTTGCAACCGCAAATGCAGACACATTATGTATAGGTTATCA | |
| | TGCGAACAACTCAACAGACACTGTAGACACAGTACTAGAAAAGAATG | |
| | TAACAGTAACACACTCTGTTAACCTTCTAGAAGACAAGCATAACGGGA | |
| | AACTATGCAAACTAAGAGGGGTAGCCCCATTGCATTTGGGTAAATGT | |
| | AACATTGCTGGCTGGATCCTGGGAAATCCAGAGTGTGAATCACTCTC | |
| | CACAGCAAGCTCATGGTCCTACATTGTGGAAACATCTAGTTCAGACA | |
| | ATGGAACGTGTTACCCAGGAGATTTCATCGATTATGAGGAGCTAAGA | |
| | GAGCAATTGAGCTCAGTGTCATCATTTGAAAGGTTTGAGATATTCCCC | |
| | AAGACAAGTTCATGGCCCAATCATGACTCGAACAAAGGTGTAACGAC | |
| | AGCATGTCCTCATGCTGGAGCAAAAAGCTTCTACAAAAATTTAATATG | |
| | GCTAGTTAAAAAAGGAAATTCATACCCAAAGCTCAGCAAATCCTACAT | |
| | TAATGATAAAGGGAAAGAAGTCCTCGTGCTATGGGGCATTCACCATC | |
| | CACCTACTAGTGCTGACCAACAAAGTCTCTATCAGAATGCAGATGCA | |
| | TATGTTTTTGTGGGGACATCAAGATACAGCAAGAAGTTCAAGCCGGA | |
| | AATAGCAATAAGGCCCAAAGTGAGGGATCAAGAAGGGAGAATGAACT | |
| | ATTACTGGACACTAGTAGAGCCGGGAGACAAAATAACATTCGAAGCA | |
| | ACTGGAAATCTAGTGGTACCGAGATATGCATTCGCAATGGAAAGAAA | |
| | TGCTGGATCTGGTATTATCATTTCAGATACACCAGTCCACGATTGCAA | |
| | TACAACTTGTCAGACACCCAAGGGTGCTATAAACACCAGCCTCCCAT | |
| | TTCAGAACATACATCCGATCACAATTGGAAAATGTCCAAAATATGTAA | |
| | AAAGCACAAAATTGAGACTGGCCACAGGATTGAGGAATGTCCCGTCC | |
| | ATTCAATCTAGAGGCCTATTTGGGGCCATTGCCGGTTTCATTGAAGG | |
| | GGGGTGGACAGGGATGGTAGATGGATGGTACGGTTATCACCATCAA | |
| | AATGAGCAGGGGTCAGGATATGCAGCCGACCTGAAGAGCACACAGA | |
| | ATGCCATTGACGAGATTACTAACAAAGTAAACTCTGTTATTGAAAAAA | |
| | TGAATACACAGTTCACAGCAGTAGGTAAAGAGTTCAACCACCTGGAA | |
| | AAAAGAATAGAGAATTTAAATAAAAAAGTTGATGATGGTTTCCTGGAC | |
| | ATTTGGACTTACAATGCCGAACTGTTGGTTCTATTGGAAAATGAAAGA | |
| | ACTTTGGACTACCACGATTCAAAGGTGAAGAACTTATATGAAAAGGTA | |
| | AGAAGCCAGTTAAAAAACAATGCCAAGGAAATTGGAAACGGCTGCTT | |
| | TGAATTTTACCACAAATGTGATAACACGTGCATGGAAAGTGTCAAAAA | |
| | TGGGACTTATGACTACCCAAAATACTCAGAGGAAGCAAAATTAAACA | |
| | GAGAAGAAATAGATGGGGTAAAGCTGGAATCAACAAGGATTTACCAG | |
| | ATTTTGGCGATCTATTCAACCGTCGCCAGTTCATTGGTACTGGTAGTC | |
| | TCCCTGGGGGCAATCAGTTTCTGGATGTGCTCTAATGGGTCTCTACA | |
| | GTGTAGAATATGTATTTAAGGAAGCGGAGCCACGAACTTCTCTCTGTT | |
| | AAAGCAAGCAGGAGATGTTGAAGAAAACCCCGGGCCTAGCAAAAGC | |
| | AGGGGATAATTCTATTAACCATGAAGACTATCATTGCTTTGAGCTACA | |
| | TTCTATGTCTGGTTTTCGCTCAAAAACTTCCTGGAAATGACAATAGCA | |
| | CTGCAACGCTGTGCCTTGGGCACCATGCAGTACCAAACGGAACGAT | |
| | AGTGAAAACAATCACGAATGACCAAATTGAAGTTACTAATGCTACTGA | |
| | GCTGGTTCAGAATTCCTCAATAGGTGAAATATGCGACAGTCCTCATC | |
| | AGATCCTTGATGGAGAAAACTGCACACTAATAGATGCTCTATTGGGA | |
| | GACCCTCAGTGTGATGGCTTTCAAAATAAGAAATGGGACCTTTTTGTT | |
| | GAACGAAGCAAAGCCTACAGCAACTGTTACCCTTATGATGTGCCGGA | |
| | TTATGCCTCCCTTAGGTCACTAGTTGCCTCATCCGGCACACTGGAGT | |
| | TTAACAATGAAAGCTTCAATTGGGCTGGAGTCACTCAAAACGGAACA | |
| | AGTTCTGCTTGCATAAGGGGATCTAATAGTAGTTTCTTTAGTAGATTA | |
| | AATTGGTTGACCCACTTAAACTTCAAGTACCCAGCATTGAACGTGACT | |
| | ATGCCAAACAATGAACAATTTGACAAATTGTACATTTGGGGGGTTCAC | |
| | CACCCGGGTACGGACAAGGACCAAATCTTCCTGTATGCTCAATCATC | |
| | AGGAAGAATCACAGTATCTACCAAAAGAAGCCAACAAGCTGTAATCC | |
| | CGAATATCGGATCTAGACCCAGAATAAGGAATATCCCTAGCAGAATA | |
| | AGCATCTATTGGACAATAGTAAAACCGGGAGACATACTTTTGATTAAC | |
| | AGCACAGGGAATCTAATTGCTCCTAGGGGTTACTTCAAAATACGAAG | |
| | TGGGAAAAGCTCAATAATGAGATCAGATGCACCCATTGGCAAATGCA | |
| | AGTCTGAATGCATCACTCCAAATGGAAGCATTCCCAATGACAAACCAT | |
| | TCCAAAATGTAAACAGGATCACATACGGGGCCTGTCCCAGATATGTT | |
| | AAGCAAAGCACTCTGAAATTGGCAACAGGAATGCGAAATGTACCAGA | |
| | GAAACAAACTAGAGGCATATTTGGCGCAATAGCGGGTTTCATAGAAA | |
| | ATGGTTGGGAGGGAATGGTGGATGGTTGGTACGGTTTCAGGCATCA | |
| | AAATTCTGAGGGAAGAGGACAAGCAGCAGATCTCAAAAGCACTCAAG | |
| | CAGCAATCGATCAAATCAATGGGAAGCTGAATCGATTGATCGGGAAA | |
| | ACCAACGAGAAATTCCATCAGATTGAGAAAGAATTCTCAGAAGTAGAA | |
| | GGGAGAATTCAGGACCTTGAGAAATATGTTGAGGACACAAAAATAGA | |
| | TCTCTGGTCATACAACGCAGAGCTTCTTGTTGCCCTGGAAAACCAAC | |
| | ATACAATTGATCTAACTGACTCAGAAATGAACAAACTGTTTGAAAAAA | |
| | CAAAGAAGCAACTGAGGGAAAATGCTGAGGATATGGGCAATGGTTGT | |
| | TTCAAAATATACCACAAATGTGACAATGCCTGCATAGGATCAATCAGA | |
| | AATGGAACTTATGACCACGATGTATACAGGGATGAAGCATTAAACAA | |
| | CCGGTTCCAGATCAAGGGAGTTGAGCTGAAGTCAGGGTACAAAGATT | |
| | GGATCCTATGGATTTCCTTTGCCATATCATGTTTTTTGCTTTGTGTTGC | |
| | TTTGTTGGGGTTCATCATGTGGGCCTGCCAAAAGGGCAACATTAGGT | |
| | GCAACATTTGCATTTGAGTGCATTAATTAAAAACACCCTTGTTTCTACT | |
| | GGAAGCGGAGCCACGAACTTCTCTCTGTTAAAGCAAGCAGGAGATGT | |
| | TGAAGAAAACCCCGGGCCTATTTTCTAATATCCACAAAATGAAGGCAA | |
| | TAATTGTACTACTCATGGTAGTAACATCCAATGCAGATCGAATCTGCA | |
| | CTGGGATAACATCGTCAAACTCACCACATGTCGTCAAAACTGCTACT | |
| | CAAGGGGAGGTCAACGTGACCGGTGTAATACCACTGACAACAACAC | |
| | CCACCAAATCTCATTTTGCAAATCTCAAAGGAACAGAAACCAGGGGG | |
| | AAACTATGCCCAAAATGCCTCAACTGCACAGATCTGGATGTAGCCTT | |
| | GGGCAGACCAAAATGCACAGGGAAAATACCCTCTGCAAGGGTTTCAA | |
| | TACTCCATGAAGTCAGACCTGTTACATCTGGGTGCTTTCCTATAATGC | |
| | ACGATAGAACAAAAATTAGACAGCTGCCTAACCTTCTCCGAGGATAC | |
| | GAACATGTCAGGTTATCAACTCACAACGTTATCAATGCAAAAGATGCA | |
| | CCAGGAAGACCCTACGAAATTGGAACCTCAGGGTCTTGCCCTAACAT | |
| | TACCAATGGAAACGGATTCTTCGCAACAATGGCTTGGGCCGTCCCAA | |
| | AAAACAAAACAGCAACAAATCCATTAACAATAGAAGTACCATACATTT | |
| | GTACAGAAGGAGAAGACCAAATTACCGTTTGGGGGTTCCACTCTGAC | |
| | AACGAGACCCAAATGGCAAAGCTCTATGGGGACTCAAAGCCCCAGA | |
| | AGTTCACCTCATCTGCCAACGGAGTGACCACACATTACGTTTCACAG | |
| | ATTGGTGGCTTCCCAAATCAAACAGAAGACGGAGGACTACCACAAAG | |
| | TGGCAGAATTGTTGTTGATTACATGGTGCAGAAATCTGGAAAAACAG | |
| | GAACAATTACCTATCAAAGAGGTATTTTATTGCCTCAAAAAGTGTGGT | |
| | GCGCAAGTGGCAGGAGCAAGGTAATAAAAGGATCCTTGCCCTTAATT | |
| | GGAGAAGCAGATTGCCTCCATGAAAAATACGGTGGATTAAACAAAAG | |
| | CAAGCCTTACTACACAGGGGAACATGCAAAGGCCATAGGAAATTGCC | |
| | CAATATGGGTGAAAACACCCTTGAAGCTGGCCAATGGAACCAAATAT | |
| | AGACCCCCTGCAAAACTATTAAAGGAAAGAGGTTTCTTCGGAGCCAT | |
| | TGCTGGTTTCTTAGAGGGAGGATGGGAAGGAATGATTGCAGGTTGG | |
| | CACGGATACACATCCCATGGGGCACATGGAGTAGCGGTGGCAGCTG | |
| | ACCTTAAGAGCACTCAAGAGGCCATAAACAAGATAACAAAAAATCTCA | |
| | ACTCTTTGAGTGAGCTGGAAGTAAAGAATCTTCAAAGACTAAGCGGT | |
| | GCCATGGATGAACTCCACAACGAAATACTAGAACTAGATGAGAAAGT | |
| | GGATGATCTCAGAGCTGACACAATAAGCTCACAAATAGAACTCGCAG | |
| | TCCTGCTTTCCAATGAAGGAATAATAAACAGTGAAGATGAACATCTCT | |
| | TGGCGCTTGAAAGAAAGCTGAAGAAAATGCTGGGCCCCTCTGCTGTA | |
| | GAGATAGGGAATGGATGCTTTGAAACCAAACACAAGTGCAACCAGAC | |
| | CTGCCTCGACAGAATAGCTGCTGGTACCTTTGATGCAGGAGAATTTT | |
| | CTCTCCCCACCTTTGATTCACTGAATATTACTGCTGCATCTTTAAATG | |
| | ACGACGGATTGGACAATCATACTATACTGCTTTACTACTCAACTGCTG | |
| | CCTCCAGTTTGGCTGTAACACTGATGATAGCTATCTTTGTTGTTTATA | |
| | TGGTCTCCAGAGACAATGTTTCTTGCTCCATTTGTCTATAAGGAAAGT | |
| | TAAGCCCTGTATTTTCCTTTATTGTAGTGCTTGTTTGCTTGTTGTCATT | |
| | ACAAAGAAACGTTATTGAAAAATTGATGACTCGAGCTGGTACTGCATG | |
| | CACGCAATGCTAGCTGCCCCTTTCCCGTCCTGGGTACCCCGAGTCTC | |
| | CCCCGACCTCGGGTCCCAGGTATGCTCCCACCTCCACCTGCCCCAC | |
| | TCACCACCTCTGCTAGTTCCAGACACCTCCCAAGCACGCAGCAATGC | |
| | AGCTCAAAACGCTTAGCCTAGCCACACCCCCACGGGAAACAGCAGT | |
| | GATTAACCTTTAGCAATAAACGAAAGTTTAACTAAGCTATACTAACCC | |
| | CAGGGTTGGTCAATTTCGTGCCAGCCACACCCTGGAGCTAGCAAAAA | |
| | AAA | |
| Pan-CoV-Flu | ATGTTCGTGTTCCTGGTGCTGCTGCCCCTGGTGAGCAGCCAGTGCG | 411 |
| Vaccine #23 | TGAACCTGATCACCAGGACCCAGAGCTACACCAACAGCTTCACCAGG | |
| CoV- Omicron | GGCGTGTACTACCCCGACAAGGTGTTCAGGAGCAGCGTGCTGCACA | |
| BA.2 | GCACCCAGGACCTGTTCCTGCCCTTCTTCAGCAACGTGACCTGGTTC | |
| Spike(HexaPra)- | CACGCCATCCACGTGAGCGGCACCAACGGCACCAAGAGGTTCGACA | |
| Influenza (HA) | ACCCCGTGCTGCCCTTCAACGACGGCGTGTACTTCGCCAGCACCGA | |
| | GAAGAGCAACATCATCAGGGGCTGGATCTTCGGCACCACCCTGGAC | |
| | AGCAAGACCCAGAGCCTGCTGATCGTGAACAACGCCACCAACGTGG | |
| | TGATCAAGGTGTGCGAGTTCCAGTTCTGCAACGACCCCTTCCTGGAC | |
| | GTGTACTACCACAAGAACAACAAGAGCTGGATGGAGAGCGAGTTCA | |
| | GGGTGTACAGCAGCGCCAACAACTGCACCTTCGAGTACGTGAGCCA | |
| | GCCCTTCCTGATGGACCTGGAGGGCAAGCAGGGCAACTTCAAGAAC | |
| | CTGAGGGAGTTCGTGTTCAAGAACATCGACGGCTACTTCAAGATCTA | |
| | CAGCAAGCACACCCCCATCAACCTGGGCAGGGACCTGCCCCAGGGC | |
| | TTCAGCGCCCTGGAGCCCCTGGTGGACCTGCCCATCGGCATCAACA | |
| | TCACCAGGTTCCAGACCCTGCTGGCCCTGCACAGGAGCTACCTGAC | |
| | CCCCGGCGACAGCAGCAGCGGCTGGACCGCCGGCGCCGCCGCCTA | |
| | CTACGTGGGCTACCTGCAGCCCAGGACCTTCCTGCTGAAGTACAAC | |
| | GAGAACGGCACCATCACCGACGCCGTGGACTGCGCCCTGGACCCC | |
| | CTGAGCGAGACCAAGTGCACCCTGAAGAGCTTCACCGTGGAGAAGG | |
| | GCATCTACCAGACCAGCAACTTCAGGGTGCAGCCCACCGAGAGCAT | |
| | CGTGAGGTTCCCCAACATCACCAACCTGTGCCCCTTCGACGAGGTGT | |
| | TCAACGCCACCAGGTTCGCCAGCGTGTACGCCTGGAACAGGAAGAG | |
| | GATCAGCAACTGCGTGGCCGACTACAGCGTGCTGTACAACTTCGCC | |
| | CCCTTCTTCGCCTTCAAGTGCTACGGCGTGAGCCCCACCAAGCTGAA | |
| | CGACCTGTGCTTCACCAACGTGTACGCCGACAGCTTCGTGATCAGG | |
| | GGCAACGAGGTGAGCCAGATCGCCCCCGGCCAGACCGGCAACATC | |
| | GCCGACTACAACTACAAGCTGCCCGACGACTTCACCGGCTGCGTGA | |
| | TCGCCTGGAACAGCAACAAGCTGGACAGCAAGGTGGGCGGCAACTA | |
| | CAACTACCTGTACAGGCTGTTCAGGAAGAGCAACCTGAAGCCCTTCG | |
| | AGAGGGACATCAGCACCGAGATCTACCAGGCCGGCAACAAGCCCTG | |
| | CAACGGCGTGGCCGGCTTCAACTGCTACTTCCCCCTGAGGAGCTAC | |
| | GGCTTCAGGCCCACCTACGGCGTGGGCCACCAGCCCTACAGGGTG | |
| | GTGGTGCTGAGCTTCGAGCTGCTGCACGCCCCCGCCACCGTGTGCG | |
| | GCCCCAAGAAGAGCACCAACCTGGTGAAGAACAAGTGCGTGAACTT | |
| | CAACTTCAACGGCCTGACCGGCACCGGCGTGCTGACCGAGAGCAAC | |
| | AAGAAGTTCCTGCCCTTCCAGCAGTTCGGCAGGGACATCGCCGACA | |
| | CCACCGACGCCGTGAGGGACCCCCAGACCCTGGAGATCCTGGACAT | |
| | CACCCCCTGCAGCTTCGGCGGCGTGAGCGTGATCACCCCCGGCACC | |
| | AACACCAGCAACCAGGTGGCCGTGCTGTACCAGGGCGTGAACTGCA | |
| | CCGAGGTGCCCGTGGCCATCCACGCCGACCAGCTGACCCCCACCTG | |
| | GAGGGTGTACAGCACCGGCAGCAACGTGTTCCAGACCAGGGCCGG | |
| | CTGCCTGATCGGCGCCGAGTACGTGAACAACAGCTACGAGTGCGAC | |
| | ATCCCCATCGGCGCCGGCATCTGCGCCAGCTACCAGACCCAGACCA | |
| | AGAGCCACCAGCAGGCCCAGAGCGTGGCCAGCCAGAGCATCATCG | |
| | CCTACACCATGAGCCTGGGCGCCGAGAACAGCGTGGCCTACAGCAA | |
| | CAACAGCATCGCCATCCCCACCAACTTCACCATCAGCGTGACCACCG | |
| | AGATCCTGCCCGTGAGCATGACCAAGACCAGCGTGGACTGCACCAT | |
| | GTACATCTGCGGCGACAGCACCGAGTGCAGCAACCTGCTGCTGCAG | |
| | TACGGCAGCTTCTGCACCCAGCTGAAGAGGGCCCTGACCGGCATCG | |
| | CCGTGGAGCAGGACAAGAACACCCAGGAGGTGTTCGCCCAGGTGAA | |
| | GCAGATCTACAAGACCCCCCCCATCAAGTACTTCGGCGGCTTCAACT | |
| | TCAGCCAGATCCTGCCCGACCCCAGCAAGCCCAGCAAGAGGAGCCC | |
| | CATCGAGGACCTGCTGTTCAACAAGGTGACCCTGGCCGACGCCGGC | |
| | TTCATCAAGCAGTACGGCGACTGCCTGGGCGACATCGCCGCCAGGG | |
| | ACCTGATCTGCGCCCAGAAGTTCAACGGCCTGACCGTGCTGCCCCC | |
| | CCTGCTGACCGACGAGATGATCGCCCAGTACACCAGCGCCCTGCTG | |
| | GCCGGCACCATCACCAGCGGCTGGACCTTCGGCGCCGGCCCCGCC | |
| | CTGCAGATCCCCTTCCCCATGCAGATGGCCTACAGGTTCAACGGCAT | |
| | CGGCGTGACCCAGAACGTGCTGTACGAGAACCAGAAGCTGATCGCC | |
| | AACCAGTTCAACAGCGCCATCGGCAAGATCCAGGACAGCCTGAGCA | |
| | GCACCCCCAGCGCCCTGGGCAAGCTGCAGGACGTGGTGAACCACAA | |
| | CGCCCAGGCCCTGAACACCCTGGTGAAGCAGCTGAGCAGCAAGTTC | |
| | GGCGCCATCAGCAGCGTGCTGAACGACATCCTGAGCAGGCTGGACC | |
| | CCCCCGAGGCCGAGGTGCAGATCGACAGGCTGATCACCGGCAGGC | |
| | TGCAGAGCCTGCAGACCTACGTGACCCAGCAGCTGATCAGGGCCGC | |
| | CGAGATCAGGGCCAGCGCCAACCTGGCCGCCACCAAGATGAGCGA | |
| | GTGCGTGCTGGGCCAGAGCAAGAGGGTGGACTTCTGCGGCAAGGG | |
| | CTACCACCTGATGAGCTTCCCCCAGAGCGCCCCCCACGGCGTGGTG | |
| | TTCCTGCACGTGACCTACGTGCCCGCCCAGGAGAAGAACTTCACCA | |
| | CCGCCCCCGCCATCTGCCACGACGGCAAGGCCCACTTCCCCAGGGA | |
| | GGGCGTGTTCGTGAGCAACGGCACCCACTGGTTCGTGACCCAGAGG | |
| | AACTTCTACGAGCCCCAGATCATCACCACCGACAACACCTTCGTGAG | |
| | CGGCAACTGCGACGTGGTGATCGGCATCGTGAACAACACCGTGTAC | |
| | GACCCCCTGCAGCCCGAGCTGGACAGCTTCAAGGAGGAGCTGGACA | |
| | AGTACTTCAAGAACCACACCAGCCCCGACGTGGACCTGGGCGACAT | |
| | CAGCGGCATCAACGCCAGCGTGGTGAACATCCAGAAGGAGATCGAC | |
| | AGGCTGAACGAGGTGGCCAAGAACCTGAACGAGAGCCTGATCGACC | |
| | TGCAGGAGCTGGGCAAGTACGAGCAGTACATCAAGTGGCCCTGGTA | |
| | CATCTGGCTGGGCTTCATCGCCGGCCTGATCGCCATCGTGATGGTG | |
| | ACCATCATGCTGTGCTGCATGACCAGCTGCTGCAGCTGCCTGAAGG | |
| | GCTGCTGCAGCTGCGGCAGCTGCTGCAAGTTCGACGAGGACGACAG | |
| | CGAGCCCGTGCTGAAGGGCGTGAAGCTGCACTACACCGGAAGCGG | |
| | AGCCACGAACTTCTCTCTGTTAAAGCAAGCAGGAGATGTTGAAGAAA | |
| | ACCCCGGGCCTATGAAGGCAATACTAGTAGTTCTGCTATATACATTTG | |
| | CAACCGCAAATGCAGACACATTATGTATAGGTTATCATGCGAACAACT | |
| | CAACAGACACTGTAGACACAGTACTAGAAAAGAATGTAACAGTAACA | |
| | CACTCTGTTAACCTTCTAGAAGACAAGCATAACGGGAAACTATGCAAA | |
| | CTAAGAGGGGTAGCCCCATTGCATTTGGGTAAATGTAACATTGCTGG | |
| | CTGGATCCTGGGAAATCCAGAGTGTGAATCACTCTCCACAGCAAGCT | |
| | CATGGTCCTACATTGTGGAAACATCTAGTTCAGACAATGGAACGTGTT | |
| | ACCCAGGAGATTTCATCGATTATGAGGAGCTAAGAGAGCAATTGAGC | |
| | TCAGTGTCATCATTTGAAAGGTTTGAGATATTCCCCAAGACAAGTTCA | |
| | TGGCCCAATCATGACTCGAACAAAGGTGTAACGACAGCATGTCCTCA | |
| | TGCTGGAGCAAAAAGCTTCTACAAAAATTTAATATGGCTAGTTAAAAA | |
| | AGGAAATTCATACCCAAAGCTCAGGAAATCCTACATTAATGATAAAGG | |
| | GAAAGAAGTCCTCGTGCTATGGGGCATTCACCATCCACCTACTAGTG | |
| | CTGACCAACAAAGTCTCTATCAGAATGCAGATGCATATGTTTTTGTGG | |
| | GGACATCAAGATACAGCAAGAAGTTCAAGCCGGAAATAGCAATAAGG | |
| | CCCAAAGTGAGGGATCAAGAAGGGAGAATGAACTATTACTGGACACT | |
| | AGTAGAGCCGGGAGACAAAATAACATTCGAAGCAACTGGAAATCTAG | |
| | TGGTACCGAGATATGCATTCGCAATGGAAAGAAATGCTGGATCTGGT | |
| | ATTATCATTTCAGATACACCAGTCCACGATTGCAATACAACTTGTCAG | |
| | ACACCCAAGGGTGCTATAAACACCAGCCTCCCATTTCAGAACATACA | |
| | TCCGATCACAATTGGAAAATGTCCAAAATATGTAAAAAGCACAAAATT | |
| | GAGACTGGCCACAGGATTGAGGAATGTCCCGTCCATTCAATCTAGAG | |
| | GCCTATTTGGGGCCATTGCCGGTTTCATTGAAGGGGGGTGGACAGG | |
| | GATGGTAGATGGATGGTACGGTTATCACCATCAAAATGAGCAGGGGT | |
| | CAGGATATGCAGCCGACCTGAAGAGCACACAGAATGCCATTGACGA | |
| | GATTACTAACAAAGTAAACTCTGTTATTGAAAAAATGAATACACAGTTC | |
| | ACAGCAGTAGGTAAAGAGTTCAACCACCTGGAAAAAAGAATAGAGAA | |
| | TTTAAATAAAAAAGTTGATGATGGTTTCCTGGACATTTGGACTTACAAT | |
| | GCCGAACTGTTGGTTCTATTGGAAAATGAAAGAACTTTGGACTACCA | |
| | CGATTCAAAGGTGAAGAACTTATATGAAAAGGTAAGAAGCCAGTTAAA | |
| | AAACAATGCCAAGGAAATTGGAAACGGCTGCTTTGAATTTTACCACAA | |
| | ATGTGATAACACGTGCATGGAAAGTGTCAAAAATGGGACTTATGACT | |
| | ACCCAAAATACTGAGAGGAAGGAAAATTAAACAGAGAAGAAATAGAT | |
| | GGGGTAAAGCTGGAATCAACAAGGATTTACCAGATTTTGGCGATCTA | |
| | TTCAACCGTCGCCAGTTCATTGGTACTGGTAGTCTCCCTGGGGGCAA | |
| | TCAGTTTCTGGATGTGCTCTAATGGGTCTCTACAGTGTAGAATATGTA | |
| | TTTAAGGAAGCGGAGCCACGAACTTCTCTCTGTTAAAGCAAGCAGGA | |
| | GATGTTGAAGAAAACCCCGGGCCTAGCAAAAGCAGGGGATAATTCTA | |
| | TTAACCATGAAGACTATCATTGCTTTGAGCTACATTCTATGTCTGGTTT | |
| | TCGCTCAAAAACTTCCTGGAAATGACAATAGCACTGCAACGCTGTGC | |
| | CTTGGGCACCATGCAGTACCAAACGGAACGATAGTGAAAACAATCAC | |
| | GAATGACCAAATTGAAGTTACTAATGCTACTGAGCTGGTTCAGAATTC | |
| | CTCAATAGGTGAAATATGCGACAGTCCTCATCAGATCCTTGATGGAG | |
| | AAAACTGCACACTAATAGATGCTCTATTGGGAGACCCTCAGTGTGAT | |
| | GGCTTTCAAAATAAGAAATGGGACCTTTTTGTTGAACGAAGCAAAGC | |
| | CTACAGCAACTGTTACCCTTATGATGTGCCGGATTATGCCTCCCTTAG | |
| | GTCACTAGTTGCCTCATCCGGCACACTGGAGTTTAACAATGAAAGCT | |
| | TCAATTGGGCTGGAGTCACTCAAAACGGAACAAGTTCTGCTTGCATA | |
| | AGGGGATCTAATAGTAGTTTCTTTAGTAGATTAAATTGGTTGACCCAC | |
| | TTAAACTTCAAGTACCCAGCATTGAACGTGACTATGCCAAACAATGAA | |
| | CAATTTGACAAATTGTACATTTGGGGGGTTCACCACCCGGGTACGGA | |
| | CAAGGACCAAATCTTCCTGTATGCTCAATCATCAGGAAGAATCACAGT | |
| | ATCTACCAAAAGAAGCCAACAAGCTGTAATCCCGAATATCGGATCTA | |
| | GACCCAGAATAAGGAATATCCCTAGCAGAATAAGCATCTATTGGACA | |
| | ATAGTAAAACCGGGAGACATACTTTTGATTAACAGCACAGGGAATCTA | |
| | ATTGCTCCTAGGGGTTACTTCAAAATACGAAGTGGGAAAAGCTCAAT | |
| | AATGAGATCAGATGCACCCATTGGCAAATGCAAGTCTGAATGCATCA | |
| | CTCCAAATGGAAGCATTCCCAATGACAAACCATTCCAAAATGTAAACA | |
| | GGATCACATACGGGGCCTGTCCCAGATATGTTAAGCAAAGCACTCTG | |
| | AAATTGGCAACAGGAATGCGAAATGTACCAGAGAAACAAACTAGAGG | |
| | CATATTTGGCGCAATAGCGGGTTTCATAGAAAATGGTTGGGAGGGAA | |
| | TGGTGGATGGTTGGTACGGTTTCAGGCATCAAAATTCTGAGGGAAGA | |
| | GGACAAGCAGCAGATCTCAAAAGCACTCAAGCAGCAATCGATCAAAT | |
| | CAATGGGAAGCTGAATCGATTGATCGGGAAAACCAACGAGAAATTCC | |
| | ATCAGATTGAGAAAGAATTCTCAGAAGTAGAAGGGAGAATTCAGGAC | |
| | CTTGAGAAATATGTTGAGGACACAAAAATAGATCTCTGGTCATACAAC | |
| | GCAGAGCTTCTTGTTGCCCTGGAAAACCAACATACAATTGATCTAACT | |
| | GACTCAGAAATGAACAAACTGTTTGAAAAAACAAAGAAGCAACTGAG | |
| | GGAAAATGCTGAGGATATGGGCAATGGTTGTTTCAAAATATACCACA | |
| | AATGTGACAATGCCTGCATAGGATCAATCAGAAATGGAACTTATGAC | |
| | CACGATGTATACAGGGATGAAGCATTAAACAACCGGTTCCAGATCAA | |
| | GGGAGTTGAGCTGAAGTCAGGGTACAAAGATTGGATCCTATGGATTT | |
| | CCTTTGCCATATCATGTTTTTTGCTTTGTGTTGCTTTGTTGGGGTTCAT | |
| | CATGTGGGCCTGCCAAAAGGGCAACATTAGGTGCAACATTTGCATTT | |
| | GAGTGCATTAATTAAAAACACCCTTGTTTCTACTGGAAGCGGAGCCA | |
| | CGAACTTCTCTCTGTTAAAGCAAGCAGGAGATGTTGAAGAAAACCCC | |
| | GGGCCTATTTTCTAATATCCACAAAATGAAGGCAATAATTGTACTACT | |
| | CATGGTAGTAACATCCAATGCAGATCGAATCTGCACTGGGATAACAT | |
| | CGTCAAACTCACCACATGTCGTCAAAACTGCTACTCAAGGGGAGGTC | |
| | AACGTGACCGGTGTAATACCACTGACAACAACACCCACCAAATCTCA | |
| | TTTTGCAAATCTCAAAGGAACAGAAACCAGGGGGAAACTATGCCCAA | |
| | AATGCCTCAACTGCACAGATCTGGATGTAGCCTTGGGCAGACCAAAA | |
| | TGCACAGGGAAAATACCCTCTGCAAGGGTTTCAATACTCCATGAAGT | |
| | CAGACCTGTTACATCTGGGTGCTTTCCTATAATGCACGATAGAACAAA | |
| | AATTAGACAGCTGCCTAACCTTCTCCGAGGATACGAACATGTCAGGT | |
| | TATCAACTCACAACGTTATCAATGCAAAAGATGCACCAGGAAGACCC | |
| | TACGAAATTGGAACCTCAGGGTCTTGCCCTAACATTACCAATGGAAA | |
| | CGGATTCTTCGCAACAATGGCTTGGGCCGTCCCAAAAAACAAAACAG | |
| | CAACAAATCCATTAACAATAGAAGTACCATACATTTGTACAGAAGGAG | |
| | AAGACCAAATTACCGTTTGGGGGTTCCACTCTGACAACGAGACCCAA | |
| | ATGGCAAAGCTCTATGGGGACTCAAAGCCCCAGAAGTTCACCTCATC | |
| | TGCCAACGGAGTGACCACACATTACGTTTCACAGATTGGTGGCTTCC | |
| | CAAATCAAACAGAAGACGGAGGACTACCACAAAGTGGCAGAATTGTT | |
| | GTTGATTACATGGTGCAGAAATCTGGAAAAACAGGAACAATTACCTAT | |
| | CAAAGAGGTATTTTATTGCCTCAAAAAGTGTGGTGCGCAAGTGGCAG | |
| | GAGCAAGGTAATAAAAGGATCCTTGCCCTTAATTGGAGAAGCAGATT | |
| | GCCTCCATGAAAAATACGGTGGATTAAACAAAAGCAAGCCTTACTAC | |
| | ACAGGGGAACATGCAAAGGCCATAGGAAATTGCCCAATATGGGTGAA | |
| | AACACCCTTGAAGCTGGCCAATGGAACCAAATATAGACCCCCTGCAA | |
| | AACTATTAAAGGAAAGAGGTTTCTTCGGAGCCATTGCTGGTTTCTTAG | |
| | AGGGAGGATGGGAAGGAATGATTGCAGGTTGGCACGGATACACATC | |
| | CCATGGGGCACATGGAGTAGCGGTGGCAGCTGACCTTAAGAGCACT | |
| | CAAGAGGCCATAAACAAGATAACAAAAAATCTCAACTCTTTGAGTGAG | |
| | CTGGAAGTAAAGAATCTTCAAAGACTAAGCGGTGCCATGGATGAACT | |
| | CCACAACGAAATACTAGAACTAGATGAGAAAGTGGATGATCTCAGAG | |
| | CTGACACAATAAGCTCACAAATAGAACTCGCAGTCCTGCTTTCCAATG | |
| | AAGGAATAATAAACAGTGAAGATGAACATCTCTTGGCGCTTGAAAGA | |
| | AAGCTGAAGAAAATGCTGGGCCCCTCTGCTGTAGAGATAGGGAATG | |
| | GATGCTTTGAAACCAAACACAAGTGCAACCAGACCTGCCTCGACAGA | |
| | ATAGCTGCTGGTACCTTTGATGCAGGAGAATTTTCTCTCCCCACCTTT | |
| | GATTCACTGAATATTACTGCTGCATCTTTAAATGACGACGGATTGGAC | |
| | AATCATACTATACTGCTTTACTACTCAACTGCTGCCTCCAGTTTGGCT | |
| | GTAACACTGATGATAGCTATCTTTGTTGTTTATATGGTCTCCAGAGAC | |
| | AATGTTTCTTGCTCCATTTGTCTATAAGGAAAGTTAAGCCCTGTATTTT | |
| | CCTTTATTGTAGTGCTTGTTTGCTTGTTGTCATTACAAAGAAACGTTAT | |
| | TGAAAAATGGAAGCGGAGCCACGAACTTCTCTCTGTTAAAGCAAGCA | |
| | GGAGATGTTGAAGAAAACCCCGGGCCTTTCGGAGCTATTGCTGGTTT | |
| | CTTGGAAGGAGGATGGGAAGGAATGATTGCAGGTTGGCACGGATAC | |
| | ACATCTCATGGAGCACATGGAGTAGCAGTGGCAGCAGACCTTAAGA | |
| | GTACCCATGATGA | |
| Pan-CoV-Flu | ATGTTCGTGTTCCTGGTGCTGCTGCCCCTGGTGAGCAGCCAGTGCG | 412 |
| Vaccine #24 | TGAACCTGATCACCAGGACCCAGAGCTACACCAACAGCTTCACCAGG | |
| CoV-Omicron | GGCGTGTACTACCCCGACAAGGTGTTCAGGAGCAGCGTGCTGCACA | |
| BA.2 Spike(2 | GCACCCAGGACCTGTTCCTGCCCTTCTTCAGCAACGTGACCTGGTTC | |
| proline | CACGCCATCCACGTGAGCGGCACCAACGGCACCAAGAGGTTCGACA | |
| substitution)- | ACCCCGTGCTGCCCTTCAACGACGGCGTGTACTTCGCCAGCACCGA | |
| Influenza (HA) | GAAGAGCAACATCATCAGGGGCTGGATCTTCGGCACCACCCTGGAC | |
| | AGCAAGACCCAGAGCCTGCTGATCGTGAACAACGCCACCAACGTGG | |
| | TGATCAAGGTGTGCGAGTTCCAGTTCTGCAACGACCCCTTCCTGGAC | |
| | GTGTACTACCACAAGAACAACAAGAGCTGGATGGAGAGCGAGTTCA | |
| | GGGTGTACAGCAGCGCCAACAACTGCACCTTCGAGTACGTGAGCCA | |
| | GCCCTTCCTGATGGACCTGGAGGGCAAGCAGGGCAACTTCAAGAAC | |
| | CTGAGGGAGTTCGTGTTCAAGAACATCGACGGCTACTTCAAGATCTA | |
| | CAGCAAGCACACCCCCATCAACCTGGGCAGGGACCTGCCCCAGGGC | |
| | TTCAGCGCCCTGGAGCCCCTGGTGGACCTGCCCATCGGCATCAACA | |
| | TCACCAGGTTCCAGACCCTGCTGGCCCTGCACAGGAGCTACCTGAC | |
| | CCCCGGCGACAGCAGCAGCGGCTGGACCGCCGGCGCCGCCGCCTA | |
| | CTACGTGGGCTACCTGCAGCCCAGGACCTTCCTGCTGAAGTACAAC | |
| | GAGAACGGCACCATCACCGACGCCGTGGACTGCGCCCTGGACCCC | |
| | CTGAGCGAGACCAAGTGCACCCTGAAGAGCTTCACCGTGGAGAAGG | |
| | GCATCTACCAGACCAGCAACTTCAGGGTGCAGCCCACCGAGAGCAT | |
| | CGTGAGGTTCCCCAACATCACCAACCTGTGCCCCTTCGACGAGGTGT | |
| | TCAACGCCACCAGGTTCGCCAGCGTGTACGCCTGGAACAGGAAGAG | |
| | GATCAGCAACTGCGTGGCCGACTACAGCGTGCTGTACAACTTCGCC | |
| | CCCTTCTTCGCCTTCAAGTGCTACGGCGTGAGCCCCACCAAGCTGAA | |
| | CGACCTGTGCTTCACCAACGTGTACGCCGACAGCTTCGTGATCAGG | |
| | GGCAACGAGGTGAGCCAGATCGCCCCCGGCCAGACCGGCAACATC | |
| | GCCGACTACAACTACAAGCTGCCCGACGACTTCACCGGCTGCGTGA | |
| | TCGCCTGGAACAGCAACAAGCTGGACAGCAAGGTGGGCGGCAACTA | |
| | CAACTACCTGTACAGGCTGTTCAGGAAGAGCAACCTGAAGCCCTTCG | |
| | AGAGGGACATCAGCACCGAGATCTACCAGGCCGGCAACAAGCCCTG | |
| | CAACGGCGTGGCCGGCTTCAACTGCTACTTCCCCCTGAGGAGCTAC | |
| | GGCTTCAGGCCCACCTACGGCGTGGGCCACCAGCCCTACAGGGTG | |
| | GTGGTGCTGAGCTTCGAGCTGCTGCACGCCCCCGCCACCGTGTGCG | |
| | GCCCCAAGAAGAGCACCAACCTGGTGAAGAACAAGTGCGTGAACTT | |
| | CAACTTCAACGGCCTGACCGGCACCGGCGTGCTGACCGAGAGCAAC | |
| | AAGAAGTTCCTGCCCTTCCAGCAGTTCGGCAGGGACATCGCCGACA | |
| | CCACCGACGCCGTGAGGGACCCCCAGACCCTGGAGATCCTGGACAT | |
| | CACCCCCTGCAGCTTCGGCGGCGTGAGCGTGATCACCCCCGGCACC | |
| | AACACCAGCAACCAGGTGGCCGTGCTGTACCAGGGCGTGAACTGCA | |
| | CCGAGGTGCCCGTGGCCATCCACGCCGACCAGCTGACCCCCACCTG | |
| | GAGGGTGTACAGCACCGGCAGCAACGTGTTCCAGACCAGGGCCGG | |
| | CTGCCTGATCGGCGCCGAGTACGTGAACAACAGCTACGAGTGCGAC | |
| | ATCCCCATCGGCGCCGGCATCTGCGCCAGCTACCAGACCCAGACCA | |
| | AGAGCCACCAGCAGGCCCAGAGCGTGGCCAGCCAGAGCATCATCG | |
| | CCTACACCATGAGCCTGGGCGCCGAGAACAGCGTGGCCTACAGCAA | |
| | CAACAGCATCGCCATCCCCACCAACTTCACCATCAGCGTGACCACCG | |
| | AGATCCTGCCCGTGAGCATGACCAAGACCAGCGTGGACTGCACCAT | |
| | GTACATCTGCGGCGACAGCACCGAGTGCAGCAACCTGCTGCTGCAG | |
| | TACGGCAGCTTCTGCACCCAGCTGAAGAGGGCCCTGACCGGCATCG | |
| | CCGTGGAGCAGGACAAGAACACCCAGGAGGTGTTCGCCCAGGTGAA | |
| | GCAGATCTACAAGACCCCCCCCATCAAGTACTTCGGCGGCTTCAACT | |
| | TCAGCCAGATCCTGCCCGACCCCAGCAAGCCCAGCAAGAGGAGCTT | |
| | CATCGAGGACCTGCTGTTCAACAAGGTGACCCTGGCCGACGCCGGC | |
| | TTCATCAAGCAGTACGGCGACTGCCTGGGCGACATCGCCGCCAGGG | |
| | ACCTGATCTGCGCCCAGAAGTTCAACGGCCTGACCGTGCTGCCCCC | |
| | CCTGCTGACCGACGAGATGATCGCCCAGTACACCAGCGCCCTGCTG | |
| | GCCGGCACCATCACCAGCGGCTGGACCTTCGGCGCCGGCGCCGCC | |
| | CTGCAGATCCCCTTCGCCATGCAGATGGCCTACAGGTTCAACGGCAT | |
| | CGGCGTGACCCAGAACGTGCTGTACGAGAACCAGAAGCTGATCGCC | |
| | AACCAGTTCAACAGCGCCATCGGCAAGATCCAGGACAGCCTGAGCA | |
| | GCACCGCCAGCGCCCTGGGCAAGCTGCAGGACGTGGTGAACCACA | |
| | ACGCCCAGGCCCTGAACACCCTGGTGAAGCAGCTGAGCAGCAAGTT | |
| | CGGCGCCATCAGCAGCGTGCTGAACGACATCCTGAGCAGGCTGGAC | |
| | CCCCCCGAGGCCGAGGTGCAGATCGACAGGCTGATCACCGGCAGG | |
| | CTGCAGAGCCTGCAGACCTACGTGACCCAGCAGCTGATCAGGGCCG | |
| | CCGAGATCAGGGCCAGCGCCAACCTGGCCGCCACCAAGATGAGCG | |
| | AGTGCGTGCTGGGCCAGAGCAAGAGGGTGGACTTCTGCGGCAAGG | |
| | GCTACCACCTGATGAGCTTCCCCCAGAGCGCCCCCCACGGCGTGGT | |
| | GTTCCTGCACGTGACCTACGTGCCCGCCCAGGAGAAGAACTTCACC | |
| | ACCGCCCCCGCCATCTGCCACGACGGCAAGGCCCACTTCCCCAGGG | |
| | AGGGCGTGTTCGTGAGCAACGGCACCCACTGGTTCGTGACCCAGAG | |
| | GAACTTCTACGAGCCCCAGATCATCACCACCGACAACACCTTCGTGA | |
| | GCGGCAACTGCGACGTGGTGATCGGCATCGTGAACAACACCGTGTA | |
| | CGACCCCCTGCAGCCCGAGCTGGACAGCTTCAAGGAGGAGCTGGAC | |
| | AAGTACTTCAAGAACCACACCAGCCCCGACGTGGACCTGGGCGACA | |
| | TCAGCGGCATCAACGCCAGCGTGGTGAACATCCAGAAGGAGATCGA | |
| | CAGGCTGAACGAGGTGGCCAAGAACCTGAACGAGAGCCTGATCGAC | |
| | CTGCAGGAGCTGGGCAAGTACGAGCAGTACATCAAGTGGCCCTGGT | |
| | ACATCTGGCTGGGCTTCATCGCCGGCCTGATCGCCATCGTGATGGT | |
| | GACCATCATGCTGTGCTGCATGACCAGCTGCTGCAGCTGCCTGAAG | |
| | GGCTGCTGCAGCTGCGGCAGCTGCTGCAAGTTCGACGAGGACGACA | |
| | GCGAGCCCGTGCTGAAGGGCGTGAAGCTGCACTACACCGGAAGCG | |
| | GAGCCACGAACTTCTCTCTGTTAAAGCAAGCAGGAGATGTTGAAGAA | |
| | AACCCCGGGCCTATGAAGGCAATACTAGTAGTTCTGCTATATACATTT | |
| | GCAACCGCAAATGCAGACACATTATGTATAGGTTATCATGCGAACAA | |
| | CTCAACAGACACTGTAGACACAGTACTAGAAAAGAATGTAACAGTAA | |
| | CACACTCTGTTAACCTTCTAGAAGACAAGCATAACGGGAAACTATGC | |
| | AAACTAAGAGGGGTAGCCCCATTGCATTTGGGTAAATGTAACATTGC | |
| | TGGCTGGATCCTGGGAAATCCAGAGTGTGAATCACTCTCCACAGCAA | |
| | GCTCATGGTCCTACATTGTGGAAACATCTAGTTCAGACAATGGAACG | |
| | TGTTACCCAGGAGATTTCATCGATTATGAGGAGCTAAGAGAGCAATT | |
| | GAGCTCAGTGTCATCATTTGAAAGGTTTGAGATATTCCCCAAGACAA | |
| | GTTCATGGCCCAATCATGACTCGAACAAAGGTGTAACGACAGCATGT | |
| | CCTCATGCTGGAGCAAAAAGCTTCTACAAAAATTTAATATGGCTAGTT | |
| | AAAAAAGGAAATTCATACCCAAAGCTCAGCAAATCCTACATTAATGAT | |
| | AAAGGGAAAGAAGTCCTCGTGCTATGGGGCATTCACCATCCACCTAC | |
| | TAGTGCTGACCAACAAAGTCTCTATCAGAATGCAGATGCATATGTTTT | |
| | TGTGGGGACATCAAGATACAGCAAGAAGTTCAAGCCGGAAATAGCAA | |
| | TAAGGCCCAAAGTGAGGGATCAAGAAGGGAGAATGAACTATTACTGG | |
| | ACACTAGTAGAGCCGGGAGACAAAATAACATTCGAAGCAACTGGAAA | |
| | TCTAGTGGTACCGAGATATGCATTCGCAATGGAAAGAAATGCTGGAT | |
| | CTGGTATTATCATTTCAGATACACCAGTCCACGATTGCAATACAACTT | |
| | GTCAGACACCCAAGGGTGCTATAAACACCAGCCTCCCATTTCAGAAC | |
| | ATACATCCGATCACAATTGGAAAATGTCCAAAATATGTAAAAAGCACA | |
| | AAATTGAGACTGGCCACAGGATTGAGGAATGTCCCGTCCATTCAATC | |
| | TAGAGGCCTATTTGGGGCCATTGCCGGTTTCATTGAAGGGGGGTGG | |
| | ACAGGGATGGTAGATGGATGGTACGGTTATCACCATCAAAATGAGCA | |
| | GGGGTCAGGATATGCAGCCGACCTGAAGAGCACACAGAATGCCATT | |
| | GACGAGATTACTAACAAAGTAAACTCTGTTATTGAAAAAATGAATACA | |
| | CAGTTCACAGCAGTAGGTAAAGAGTTCAACCACCTGGAAAAAAGAAT | |
| | AGAGAATTTAAATAAAAAAGTTGATGATGGTTTCCTGGACATTTGGAC | |
| | TTACAATGCCGAACTGTTGGTTCTATTGGAAAATGAAAGAACTTTGGA | |
| | CTACCACGATTCAAAGGTGAAGAACTTATATGAAAAGGTAAGAAGCC | |
| | AGTTAAAAAACAATGCCAAGGAAATTGGAAACGGCTGCTTTGAATTTT | |
| | ACCACAAATGTGATAACACGTGCATGGAAAGTGTCAAAAATGGGACT | |
| | TATGACTACCCAAAATACTCAGAGGAAGCAAAATTAAACAGAGAAGAA | |
| | ATAGATGGGGTAAAGCTGGAATCAACAAGGATTTACCAGATTTTGGC | |
| | GATCTATTCAACCGTCGCCAGTTCATTGGTACTGGTAGTCTCCCTGG | |
| | GGGCAATCAGTTTCTGGATGTGCTCTAATGGGTCTCTACAGTGTAGA | |
| | ATATGTATTTAAGGAAGCGGAGCCACGAACTTCTCTCTGTTAAAGCAA | |
| | GCAGGAGATGTTGAAGAAAACCCCGGGCCTAGCAAAAGCAGGGGAT | |
| | AATTCTATTAACCATGAAGACTATCATTGCTTTGAGCTACATTCTATGT | |
| | CTGGTTTTCGCTCAAAAACTTCCTGGAAATGACAATAGCACTGCAAC | |
| | GCTGTGCCTTGGGCACCATGCAGTACCAAACGGAACGATAGTGAAAA | |
| | CAATCACGAATGACCAAATTGAAGTTACTAATGCTACTGAGCTGGTTC | |
| | AGAATTCCTCAATAGGTGAAATATGCGACAGTCCTCATCAGATCCTTG | |
| | ATGGAGAAAACTGCACACTAATAGATGCTCTATTGGGAGACCCTCAG | |
| | TGTGATGGCTTTCAAAATAAGAAATGGGACCTTTTTGTTGAACGAAGC | |
| | AAAGCCTACAGCAACTGTTACCCTTATGATGTGCCGGATTATGCCTC | |
| | CCTTAGGTCACTAGTTGCCTCATCCGGCACACTGGAGTTTAACAATG | |
| | AAAGCTTCAATTGGGCTGGAGTCACTCAAAACGGAACAAGTTCTGCT | |
| | TGCATAAGGGGATCTAATAGTAGTTTCTTTAGTAGATTAAATTGGTTG | |
| | ACCCACTTAAACTTCAAGTACCCAGCATTGAACGTGACTATGCCAAAC | |
| | AATGAACAATTTGACAAATTGTACATTTGGGGGGTTCACCACCCGGG | |
| | TACGGACAAGGACCAAATCTTCCTGTATGCTCAATCATCAGGAAGAA | |
| | TCACAGTATCTACGAAAAGAAGCCAACAAGCTGTAATGCGGAATATC | |
| | GGATCTAGACCCAGAATAAGGAATATCCCTAGCAGAATAAGCATCTA | |
| | TTGGACAATAGTAAAACCGGGAGACATACTTTTGATTAACAGCACAG | |
| | GGAATCTAATTGCTCCTAGGGGTTACTTCAAAATACGAAGTGGGAAA | |
| | AGCTCAATAATGAGATCAGATGCACCCATTGGCAAATGCAAGTCTGA | |
| | ATGCATCACTCCAAATGGAAGCATTCCCAATGACAAACCATTCCAAAA | |
| | TGTAAACAGGATCACATACGGGGCCTGTCCCAGATATGTTAAGCAAA | |
| | GCACTCTGAAATTGGCAACAGGAATGCGAAATGTACCAGAGAAACAA | |
| | ACTAGAGGCATATTTGGCGCAATAGCGGGTTTCATAGAAAATGGTTG | |
| | GGAGGGAATGGTGGATGGTTGGTACGGTTTCAGGCATCAAAATTCTG | |
| | AGGGAAGAGGACAAGCAGCAGATCTCAAAAGCACTCAAGCAGCAAT | |
| | CGATCAAATCAATGGGAAGCTGAATCGATTGATCGGGAAAACCAACG | |
| | AGAAATTCCATCAGATTGAGAAAGAATTCTCAGAAGTAGAAGGGAGA | |
| | ATTCAGGACCTTGAGAAATATGTTGAGGACACAAAAATAGATCTCTGG | |
| | TCATACAACGCAGAGCTTCTTGTTGCCCTGGAAAACCAACATACAATT | |
| | GATCTAACTGACTCAGAAATGAACAAACTGTTTGAAAAAACAAAGAAG | |
| | CAACTGAGGGAAAATGCTGAGGATATGGGCAATGGTTGTTTCAAAAT | |
| | ATACCACAAATGTGACAATGCCTGCATAGGATCAATCAGAAATGGAA | |
| | CTTATGACCACGATGTATACAGGGATGAAGCATTAAACAACCGGTTC | |
| | CAGATCAAGGGAGTTGAGCTGAAGTCAGGGTACAAAGATTGGATCCT | |
| | ATGGATTTCCTTTGCCATATCATGTTTTTTGCTTTGTGTTGCTTTGTTG | |
| | GGGTTCATCATGTGGGCCTGCCAAAAGGGCAACATTAGGTGCAACAT | |
| | TTGCATTTGAGTGCATTAATTAAAAACACCCTTGTTTCTACTGGAAGC | |
| | GGAGCCACGAACTTCTCTCTGTTAAAGCAAGCAGGAGATGTTGAAGA | |
| | AAACCCCGGGCCTATTTTCTAATATCCACAAAATGAAGGCAATAATTG | |
| | TACTACTCATGGTAGTAACATCCAATGCAGATCGAATCTGCACTGGG | |
| | ATAACATCGTCAAACTCACCACATGTCGTCAAAACTGCTACTCAAGG | |
| | GGAGGTCAACGTGACCGGTGTAATACCACTGACAACAACACCCACCA | |
| | AATCTCATTTTGCAAATCTCAAAGGAACAGAAACCAGGGGGAAACTAT | |
| | GCCCAAAATGCCTCAACTGCACAGATCTGGATGTAGCCTTGGGCAGA | |
| | CCAAAATGCACAGGGAAAATACCCTCTGCAAGGGTTTCAATACTCCA | |
| | TGAAGTCAGACCTGTTACATCTGGGTGCTTTCCTATAATGCACGATAG | |
| | AACAAAAATTAGACAGCTGCCTAACCTTCTCCGAGGATACGAACATG | |
| | TCAGGTTATCAACTCACAACGTTATCAATGCAAAAGATGCACCAGGAA | |
| | GACCCTACGAAATTGGAACCTCAGGGTCTTGCCCTAACATTACCAAT | |
| | GGAAACGGATTCTTCGCAACAATGGCTTGGGCCGTCCCAAAAAACAA | |
| | AACAGCAACAAATCCATTAACAATAGAAGTACCATACATTTGTACAGA | |
| | AGGAGAAGACCAAATTACCGTTTGGGGGTTCCACTCTGACAACGAGA | |
| | CCCAAATGGCAAAGCTCTATGGGGACTCAAAGCCCCAGAAGTTCACC | |
| | TCATCTGCCAACGGAGTGACCACACATTACGTTTCACAGATTGGTGG | |
| | CTTCCCAAATCAAACAGAAGACGGAGGACTACCACAAAGTGGCAGAA | |
| | TTGTTGTTGATTACATGGTGCAGAAATCTGGAAAAACAGGAACAATTA | |
| | CCTATCAAAGAGGTATTTTATTGCCTCAAAAAGTGTGGTGCGCAAGT | |
| | GGCAGGAGCAAGGTAATAAAAGGATCCTTGCCCTTAATTGGAGAAGC | |
| | AGATTGCCTCCATGAAAAATACGGTGGATTAAACAAAAGCAAGCCTTA | |
| | CTACACAGGGGAACATGCAAAGGCCATAGGAAATTGCCCAATATGGG | |
| | TGAAAACACCCTTGAAGCTGGCCAATGGAACCAAATATAGACCCCCT | |
| | GCAAAACTATTAAAGGAAAGAGGTTTCTTCGGAGCCATTGCTGGTTT | |
| | CTTAGAGGGAGGATGGGAAGGAATGATTGCAGGTTGGCACGGATAC | |
| | ACATCCCATGGGGCACATGGAGTAGCGGTGGCAGCTGACCTTAAGA | |
| | GCACTCAAGAGGCCATAAAGAAGATAACAAAAAATCTCAACTCTTTGA | |
| | GTGAGCTGGAAGTAAAGAATCTTCAAAGACTAAGCGGTGCCATGGAT | |
| | GAACTCCACAACGAAATACTAGAACTAGATGAGAAAGTGGATGATCT | |
| | CAGAGCTGACACAATAAGCTCACAAATAGAACTCGCAGTCCTGCTTT | |
| | CCAATGAAGGAATAATAAACAGTGAAGATGAACATCTCTTGGCGCTT | |
| | GAAAGAAAGCTGAAGAAAATGCTGGGCCCCTCTGCTGTAGAGATAG | |
| | GGAATGGATGCTTTGAAACCAAACACAAGTGCAACCAGACCTGCCTC | |
| | GACAGAATAGCTGCTGGTACCTTTGATGCAGGAGAATTTTCTCTCCC | |
| | CACCTTTGATTCACTGAATATTACTGCTGCATCTTTAAATGACGACGG | |
| | ATTGGACAATCATACTATACTGCTTTACTACTCAACTGCTGCCTCCAG | |
| | TTTGGCTGTAACACTGATGATAGCTATCTTTGTTGTTTATATGGTCTC | |
| | CAGAGACAATGTTTCTTGCTCCATTTGTCTATAAGGAAAGTTAAGCCC | |
| | TGTATTTTCCTTTATTGTAGTGCTTGTTTGCTTGTTGTCATTACAAAGA | |
| | AACGTTATTGAAAAATGGAAGCGGAGCCACGAACTTCTCTCTGTTAAA | |
| | GCAAGCAGGAGATGTTGAAGAAAACCCCGGGCCTTTCGGAGCTATT | |
| | GCTGGTTTCTTGGAAGGAGGATGGGAAGGAATGATTGCAGGTTGGC | |
| | ACGGATACACATCTCATGGAGCACATGGAGTAGCAGTGGCAGCAGA | |
| | CCTTAAGAGTACCCATGATGA | |
| Pan-CoV-Flu | ATGTTCGTGTTCCTGGTGCTGCTGCCCCTGGTGAGCAGCCAGTGCG | 413 |
| Vaccine #25 | TGAACCTGACCACCAGGACCCAGCTGCCCCCCGCCTACACCAACAG | |
| CoV-Wuhan | CTTCACCAGGGGCGTGTACTACCCCGACAAGGTGTTCAGGAGCAGC | |
| Spike(HexaPro)- | GTGCTGCACAGCACCCAGGACCTGTTCCTGCCCTTCTTCAGCAACGT | |
| Influenza (HA) | GACCTGGTTCCACGCCATCCACGTGAGCGGCACCAACGGCACCAAG | |
| | AGGTTCGACAACCCCGTGCTGCCCTTCAACGACGGCGTGTACTTCG | |
| | CCAGCACCGAGAAGAGCAACATCATCAGGGGCTGGATCTTCGGCAC | |
| | CACCCTGGACAGCAAGACCCAGAGCCTGCTGATCGTGAACAACGCC | |
| | ACCAACGTGGTGATCAAGGTGTGCGAGTTCCAGTTCTGCAACGACCC | |
| | CTTCCTGGGCGTGTACTACCACAAGAACAACAAGAGCTGGATGGAGA | |
| | GCGAGTTCAGGGTGTACAGCAGCGCCAACAACTGCACCTTCGAGTA | |
| | CGTGAGCCAGCCCTTCCTGATGGACCTGGAGGGCAAGCAGGGCAAC | |
| | TTCAAGAACCTGAGGGAGTTCGTGTTCAAGAACATCGACGGCTACTT | |
| | CAAGATCTACAGCAAGCACACCCCCATCAACCTGGTGAGGGACCTG | |
| | CCCCAGGGCTTCAGCGCCCTGGAGCCCCTGGTGGACCTGCCCATCG | |
| | GCATCAACATCACCAGGTTCCAGACCCTGCTGGCCCTGCACAGGAG | |
| | CTACCTGACCCCCGGCGACAGCAGCAGCGGCTGGACCGCCGGCGC | |
| | CGCCGCCTACTACGTGGGCTACCTGCAGCCCAGGACCTTCCTGCTG | |
| | AAGTACAACGAGAACGGCACCATCACCGACGCCGTGGACTGCGCCC | |
| | TGGACCCCCTGAGCGAGACCAAGTGCACCCTGAAGAGCTTCACCGT | |
| | GGAGAAGGGCATCTACCAGACCAGCAACTTCAGGGTGCAGCCCACC | |
| | GAGAGCATCGTGAGGTTCCCCAACATCACCAACCTGTGCCCCTTCG | |
| | GCGAGGTGTTCAACGCCACCAGGTTCGCCAGCGTGTACGCCTGGAA | |
| | CAGGAAGAGGATCAGCAACTGCGTGGCCGACTACAGCGTGCTGTAC | |
| | AACAGCGCCAGCTTCAGCACCTTCAAGTGCTACGGCGTGAGCCCCA | |
| | CCAAGCTGAACGACCTGTGCTTCACCAACGTGTACGCCGACAGCTTC | |
| | GTGATCAGGGGCGACGAGGTGAGGCAGATCGCCCCCGGCCAGACC | |
| | GGCAAGATCGCCGACTACAACTACAAGCTGCCCGACGACTTCACCG | |
| | GCTGCGTGATCGCCTGGAACAGCAACAACCTGGACAGCAAGGTGGG | |
| | CGGCAACTACAACTACCTGTACAGGCTGTTCAGGAAGAGCAACCTGA | |
| | AGCCCTTCGAGAGGGACATCAGCACCGAGATCTACCAGGCCGGCAG | |
| | CACCCCCTGCAACGGCGTGGAGGGCTTCAACTGCTACTTCCCCCTG | |
| | CAGAGCTACGGCTTCCAGCCCACCAACGGCGTGGGCTACCAGCCCT | |
| | ACAGGGTGGTGGTGCTGAGCTTCGAGCTGCTGCACGCCCCCGCCAC | |
| | CGTGTGCGGCCCCAAGAAGAGCACCAACCTGGTGAAGAACAAGTGC | |
| | GTGAACTTCAACTTCAACGGCCTGACCGGCACCGGCGTGCTGACCG | |
| | AGAGCAACAAGAAGTTCCTGCCCTTCCAGCAGTTCGGCAGGGACAT | |
| | CGCCGACACCACCGACGCCGTGAGGGACCCCCAGACCCTGGAGAT | |
| | CCTGGACATCACCCCCTGCAGCTTCGGCGGCGTGAGCGTGATCACC | |
| | CCCGGCACCAACACCAGCAACCAGGTGGCCGTGCTGTACCAGGACG | |
| | TGAACTGCACCGAGGTGCCCGTGGCCATCCACGCCGACCAGCTGAC | |
| | CCCCACCTGGAGGGTGTACAGCACCGGCAGCAACGTGTTCCAGACC | |
| | AGGGCCGGCTGCCTGATCGGCGCCGAGCACGTGAACAACAGCTAC | |
| | GAGTGCGACATCCCCATCGGCGCCGGCATCTGCGCCAGCTACCAGA | |
| | CCCAGACCAACAGCCCCGGCAGCGCCAGCAGCGTGGCCAGCCAGA | |
| | GCATCATCGCCTACACCATGAGCCTGGGCGCCGAGAACAGCGTGGC | |
| | CTACAGCAACAACAGCATCGCCATCCCCACCAACTTCACCATCAGCG | |
| | TGACCACCGAGATCCTGCCCGTGAGCATGACCAAGACCAGCGTGGA | |
| | CTGCACCATGTACATCTGCGGCGACAGCACCGAGTGCAGCAACCTG | |
| | CTGCTGCAGTACGGCAGCTTCTGCACCCAGCTGAACAGGGCCCTGA | |
| | CCGGCATCGCCGTGGAGCAGGACAAGAACACCCAGGAGGTGTTCGC | |
| | CCAGGTGAAGCAGATCTACAAGACCCCCCCCATCAAGGACTTCGGC | |
| | GGCTTCAACTTCAGCCAGATCCTGCCCGACCCCAGCAAGCCCAGCA | |
| | AGAGGAGCCCCATCGAGGACCTGCTGTTCAACAAGGTGACCCTGGC | |
| | CGACGCCGGCTTCATCAAGCAGTACGGCGACTGCCTGGGCGACATC | |
| | GCCGCCAGGGACCTGATCTGCGCCCAGAAGTTCAACGGCCTGACCG | |
| | TGCTGCCCCCCCTGCTGACCGACGAGATGATCGCCCAGTACACCAG | |
| | CGCCCTGCTGGCCGGCACCATCACCAGCGGCTGGACCTTCGGCGC | |
| | CGGCCCCGCCCTGCAGATCCCCTTCCCCATGCAGATGGCCTACAGG | |
| | TTCAACGGCATCGGCGTGACCCAGAACGTGCTGTACGAGAACCAGA | |
| | AGCTGATCGCCAACCAGTTCAACAGCGCCATCGGCAAGATCCAGGA | |
| | CAGCCTGAGCAGCACCCCCAGCGCCCTGGGCAAGCTGCAGGACGT | |
| | GGTGAACCAGAACGCCCAGGCCCTGAACACCCTGGTGAAGCAGCTG | |
| | AGCAGCAACTTCGGCGCCATCAGCAGCGTGCTGAACGACATCCTGA | |
| | GCAGGCTGGACCCCCCCGAGGCCGAGGTGCAGATCGACAGGCTGA | |
| | TCACCGGCAGGCTGCAGAGCCTGCAGACCTACGTGACCCAGCAGCT | |
| | GATCAGGGCCGCCGAGATCAGGGCCAGCGCCAACCTGGCCGCCAC | |
| | CAAGATGAGCGAGTGCGTGCTGGGCCAGAGCAAGAGGGTGGACTTC | |
| | TGCGGCAAGGGCTACCACCTGATGAGCTTCCCCCAGAGCGCCCCCC | |
| | ACGGCGTGGTGTTCCTGCACGTGACCTACGTGCCCGCCCAGGAGAA | |
| | GAACTTCACCACCGCCCCCGCCATCTGCCACGACGGCAAGGCCCAC | |
| | TTCCCCAGGGAGGGCGTGTTCGTGAGCAACGGCACCCACTGGTTCG | |
| | TGACCCAGAGGAACTTCTACGAGCCCCAGATCATCACCACCGACAAC | |
| | ACCTTCGTGAGCGGCAACTGCGACGTGGTGATCGGCATCGTGAACA | |
| | ACACCGTGTACGACCCCCTGCAGCCCGAGCTGGACAGCTTCAAGGA | |
| | GGAGCTGGACAAGTACTTCAAGAACCACACCAGCCCCGACGTGGAC | |
| | CTGGGCGACATCAGCGGCATCAACGCCAGCGTGGTGAACATCCAGA | |
| | AGGAGATCGACAGGCTGAACGAGGTGGCCAAGAACCTGAACGAGAG | |
| | CCTGATCGACCTGCAGGAGCTGGGCAAGTACGAGCAGTACATCAAG | |
| | TGGCCCTGGTACATCTGGCTGGGCTTCATCGCCGGCCTGATCGCCA | |
| | TCGTGATGGTGACCATCATGCTGTGCTGCATGACCAGCTGCTGCAGC | |
| | TGCCTGAAGGGCTGCTGCAGCTGCGGCAGCTGCTGCAAGTTCGACG | |
| | AGGACGACAGCGAGCCCGTGCTGAAGGGCGTGAAGCTGCACTACAC | |
| | CGGAAGCGGAGCCACGAACTTCTCTCTGTTAAAGCAAGCAGGAGAT | |
| | GTTGAAGAAAACCCCGGGCCTATGAAGGCAATACTAGTAGTTCTGCT | |
| | ATATACATTTGCAACCGCAAATGCAGACACATTATGTATAGGTTATCA | |
| | TGCGAACAACTCAACAGACACTGTAGACACAGTACTAGAAAAGAATG | |
| | TAACAGTAACACACTCTGTTAACCTTCTAGAAGACAAGCATAACGGGA | |
| | AACTATGCAAACTAAGAGGGGTAGCCCCATTGCATTTGGGTAAATGT | |
| | AACATTGCTGGCTGGATCCTGGGAAATCCAGAGTGTGAATCACTCTC | |
| | CACAGCAAGCTCATGGTCCTACATTGTGGAAACATCTAGTTCAGACA | |
| | ATGGAACGTGTTACCCAGGAGATTTCATCGATTATGAGGAGCTAAGA | |
| | GAGCAATTGAGCTCAGTGTCATCATTTGAAAGGTTTGAGATATTCCCC | |
| | AAGACAAGTTCATGGCCCAATCATGACTCGAACAAAGGTGTAACGAC | |
| | AGCATGTCCTCATGCTGGAGCAAAAAGCTTCTACAAAAATTTAATATG | |
| | GCTAGTTAAAAAAGGAAATTCATACCCAAAGCTCAGCAAATCCTACAT | |
| | TAATGATAAAGGGAAAGAAGTCCTCGTGCTATGGGGCATTCACCATC | |
| | CACCTACTAGTGCTGACCAACAAAGTCTCTATCAGAATGCAGATGCA | |
| | TATGTTTTTGTGGGGACATCAAGATACAGCAAGAAGTTCAAGCCGGA | |
| | AATAGCAATAAGGCCCAAAGTGAGGGATCAAGAAGGGAGAATGAACT | |
| | ATTACTGGACACTAGTAGAGCCGGGAGACAAAATAACATTCGAAGCA | |
| | ACTGGAAATCTAGTGGTACCGAGATATGCATTCGCAATGGAAAGAAA | |
| | TGCTGGATCTGGTATTATCATTTCAGATACACCAGTCCACGATTGCAA | |
| | TACAACTTGTCAGACACCCAAGGGTGCTATAAACACCAGCCTCCCAT | |
| | TTCAGAACATACATCCGATCACAATTGGAAAATGTCCAAAATATGTAA | |
| | AAAGCACAAAATTGAGACTGGCCACAGGATTGAGGAATGTCCCGTCC | |
| | ATTCAATCTAGAGGCCTATTTGGGGCCATTGCCGGTTTCATTGAAGG | |
| | GGGGTGGACAGGGATGGTAGATGGATGGTACGGTTATCACCATCAA | |
| | AATGAGCAGGGGTCAGGATATGCAGCCGACCTGAAGAGCACACAGA | |
| | ATGCCATTGACGAGATTACTAACAAAGTAAACTCTGTTATTGAAAAAA | |
| | TGAATACACAGTTCACAGCAGTAGGTAAAGAGTTCAACCACCTGGAA | |
| | AAAAGAATAGAGAATTTAAATAAAAAAGTTGATGATGGTTTCCTGGAC | |
| | ATTTGGACTTACAATGCCGAACTGTTGGTTCTATTGGAAAATGAAAGA | |
| | ACTTTGGACTACCACGATTCAAAGGTGAAGAACTTATATGAAAAGGTA | |
| | AGAAGCCAGTTAAAAAACAATGCCAAGGAAATTGGAAACGGCTGCTT | |
| | TGAATTTTACCACAAATGTGATAACACGTGCATGGAAAGTGTCAAAAA | |
| | TGGGACTTATGACTACCGAAAATACTCAGAGGAAGCAAAATTAAACA | |
| | GAGAAGAAATAGATGGGGTAAAGCTGGAATCAACAAGGATTTACCAG | |
| | ATTTTGGCGATCTATTCAACCGTCGCCAGTTCATTGGTACTGGTAGTC | |
| | TCCCTGGGGGCAATCAGTTTCTGGATGTGCTCTAATGGGTCTCTACA | |
| | GTGTAGAATATGTATTTAAGGAAGCGGAGCCACGAACTTCTCTCTGTT | |
| | AAAGCAAGCAGGAGATGTTGAAGAAAACCCCGGGCCTAGCAAAAGC | |
| | AGGGGATAATTCTATTAACCATGAAGACTATCATTGCTTTGAGCTACA | |
| | TTCTATGTCTGGTTTTCGCTCAAAAACTTCCTGGAAATGACAATAGCA | |
| | CTGCAACGCTGTGCCTTGGGCACCATGCAGTACCAAACGGAACGAT | |
| | AGTGAAAACAATCACGAATGACCAAATTGAAGTTACTAATGCTACTGA | |
| | GCTGGTTCAGAATTCCTCAATAGGTGAAATATGCGACAGTCCTCATC | |
| | AGATCCTTGATGGAGAAAACTGCACACTAATAGATGCTCTATTGGGA | |
| | GACCCTCAGTGTGATGGCTTTCAAAATAAGAAATGGGACCTTTTTGTT | |
| | GAACGAAGCAAAGCCTACAGCAACTGTTACCCTTATGATGTGCCGGA | |
| | TTATGCCTCCCTTAGGTCACTAGTTGCCTCATCCGGCACACTGGAGT | |
| | TTAACAATGAAAGCTTCAATTGGGCTGGAGTCACTCAAAACGGAACA | |
| | AGTTCTGCTTGCATAAGGGGATCTAATAGTAGTTTCTTTAGTAGATTA | |
| | AATTGGTTGACCCACTTAAACTTCAAGTACCCAGCATTGAACGTGACT | |
| | ATGCCAAACAATGAACAATTTGACAAATTGTACATTTGGGGGGTTCAC | |
| | CACCCGGGTACGGACAAGGACCAAATCTTCCTGTATGCTCAATCATC | |
| | AGGAAGAATCACAGTATCTACCAAAAGAAGCCAACAAGCTGTAATCC | |
| | CGAATATGGGATCTAGACCCAGAATAAGGAATATCCCTAGCAGAATA | |
| | AGCATCTATTGGACAATAGTAAAACCGGGAGACATACTTTTGATTAAC | |
| | AGCACAGGGAATCTAATTGCTCCTAGGGGTTACTTCAAAATACGAAG | |
| | TGGGAAAAGCTCAATAATGAGATCAGATGCACCCATTGGCAAATGCA | |
| | AGTCTGAATGCATCACTCCAAATGGAAGCATTCCCAATGACAAACCAT | |
| | TCCAAAATGTAAACAGGATCACATACGGGGCCTGTCCCAGATATGTT | |
| | AAGCAAAGCACTCTGAAATTGGCAACAGGAATGCGAAATGTACCAGA | |
| | GAAACAAACTAGAGGCATATTTGGCGCAATAGCGGGTTTCATAGAAA | |
| | ATGGTTGGGAGGGAATGGTGGATGGTTGGTACGGTTTCAGGCATCA | |
| | AAATTCTGAGGGAAGAGGACAAGCAGCAGATCTCAAAAGCACTCAAG | |
| | CAGCAATCGATCAAATCAATGGGAAGCTGAATCGATTGATCGGGAAA | |
| | ACCAACGAGAAATTCCATCAGATTGAGAAAGAATTCTCAGAAGTAGAA | |
| | GGGAGAATTCAGGACCTTGAGAAATATGTTGAGGACACAAAAATAGA | |
| | TCTCTGGTCATACAACGCAGAGCTTCTTGTTGCCCTGGAAAACCAAC | |
| | ATACAATTGATCTAACTGACTCAGAAATGAACAAACTGTTTGAAAAAA | |
| | CAAAGAAGCAACTGAGGGAAAATGCTGAGGATATGGGCAATGGTTGT | |
| | TTCAAAATATACCACAAATGTGACAATGCCTGCATAGGATCAATCAGA | |
| | AATGGAACTTATGACCACGATGTATACAGGGATGAAGCATTAAACAA | |
| | CCGGTTCCAGATCAAGGGAGTTGAGCTGAAGTCAGGGTACAAAGATT | |
| | GGATCCTATGGATTTCCTTTGCCATATCATGTTTTTTGCTTTGTGTTGC | |
| | TTTGTTGGGGTTCATCATGTGGGCCTGCCAAAAGGGCAACATTAGGT | |
| | GCAACATTTGCATTTGAGTGCATTAATTAAAAACACCCTTGTTTCTACT | |
| | GGAAGCGGAGCCACGAACTTCTCTCTGTTAAAGCAAGCAGGAGATGT | |
| | TGAAGAAAACCCCGGGCCTATTTTCTAATATCCACAAAATGAAGGCAA | |
| | TAATTGTACTACTCATGGTAGTAACATCCAATGCAGATCGAATCTGCA | |
| | CTGGGATAACATCGTCAAACTCACCACATGTCGTCAAAACTGCTACT | |
| | CAAGGGGAGGTCAACGTGACCGGTGTAATACCACTGACAACAACAC | |
| | CCACCAAATCTCATTTTGCAAATCTCAAAGGAACAGAAACCAGGGGG | |
| | AAACTATGCCCAAAATGCCTCAACTGCACAGATCTGGATGTAGCCTT | |
| | GGGCAGACCAAAATGCACAGGGAAAATACCCTCTGCAAGGGTTTCAA | |
| | TACTCCATGAAGTCAGACCTGTTACATCTGGGTGCTTTCCTATAATGC | |
| | ACGATAGAACAAAAATTAGACAGCTGCCTAACCTTCTCCGAGGATAC | |
| | GAACATGTCAGGTTATCAACTCACAACGTTATCAATGCAAAAGATGCA | |
| | CCAGGAAGACCCTACGAAATTGGAACCTCAGGGTCTTGCCCTAACAT | |
| | TACCAATGGAAACGGATTCTTCGCAACAATGGCTTGGGCCGTCCCAA | |
| | AAAACAAAACAGCAACAAATCCATTAACAATAGAAGTACCATACATTT | |
| | GTACAGAAGGAGAAGACCAAATTACCGTTTGGGGGTTCCACTCTGAC | |
| | AACGAGACCCAAATGGCAAAGCTCTATGGGGACTCAAAGCCCCAGA | |
| | AGTTCACCTCATCTGCCAACGGAGTGACCACACATTACGTTTCACAG | |
| | ATTGGTGGCTTCCCAAATCAAACAGAAGACGGAGGACTACCACAAAG | |
| | TGGCAGAATTGTTGTTGATTACATGGTGCAGAAATCTGGAAAAACAG | |
| | GAACAATTACCTATCAAAGAGGTATTTTATTGCCTCAAAAAGTGTGGT | |
| | GCGCAAGTGGCAGGAGCAAGGTAATAAAAGGATCCTTGCCCTTAATT | |
| | GGAGAAGCAGATTGCCTCCATGAAAAATACGGTGGATTAAACAAAAG | |
| | CAAGCCTTACTACACAGGGGAACATGCAAAGGCCATAGGAAATTGCC | |
| | CAATATGGGTGAAAACACCCTTGAAGCTGGCCAATGGAACCAAATAT | |
| | AGACCCCCTGCAAAACTATTAAAGGAAAGAGGTTTCTTCGGAGCCAT | |
| | TGCTGGTTTCTTAGAGGGAGGATGGGAAGGAATGATTGCAGGTTGG | |
| | CACGGATACACATCCCATGGGGCACATGGAGTAGCGGTGGCAGCTG | |
| | ACCTTAAGAGCACTCAAGAGGCCATAAACAAGATAACAAAAAATCTCA | |
| | ACTCTTTGAGTGAGCTGGAAGTAAAGAATCTTCAAAGACTAAGCGGT | |
| | GCCATGGATGAACTCCACAACGAAATACTAGAACTAGATGAGAAAGT | |
| | GGATGATCTCAGAGCTGACACAATAAGCTCACAAATAGAACTCGCAG | |
| | TCCTGCTTTCCAATGAAGGAATAATAAACAGTGAAGATGAACATCTCT | |
| | TGGCGCTTGAAAGAAAGCTGAAGAAAATGCTGGGCCCCTCTGCTGTA | |
| | GAGATAGGGAATGGATGCTTTGAAACCAAACACAAGTGCAACCAGAC | |
| | CTGCCTCGACAGAATAGCTGCTGGTACCTTTGATGCAGGAGAATTTT | |
| | CTCTCCCCACCTTTGATTCACTGAATATTACTGCTGCATCTTTAAATG | |
| | ACGACGGATTGGACAATCATACTATACTGCTTTACTACTCAACTGCTG | |
| | CCTCCAGTTTGGCTGTAACACTGATGATAGCTATCTTTGTTGTTTATA | |
| | TGGTCTCCAGAGACAATGTTTCTTGCTCCATTTGTCTATAAGGAAAGT | |
| | TAAGCCCTGTATTTTCCTTTATTGTAGTGCTTGTTTGCTTGTTGTCATT | |
| | ACAAAGAAACGTTATTGAAAAATGGAAGCGGAGCCACGAACTTCTCT | |
| | CTGTTAAAGCAAGCAGGAGATGTTGAAGAAAACCCCGGGCCTTTCGG | |
| | AGCTATTGCTGGTTTCTTGGAAGGAGGATGGGAAGGAATGATTGCAG | |
| | GTTGGCACGGATACACATCTCATGGAGCACATGGAGTAGCAGTGGC | |
| | AGCAGACCTTAAGAGTACCCATGATGA | |
| Pan-CoV-Flu | ATGTTCGTGTTCCTGGTGCTGCTGCCCCTGGTGAGCAGCCAGTGCG | 414 |
| Vaccine #26 | TGAACCTGACCACCAGGACCCAGCTGCCCCCCGCCTACACCAACAG | |
| CoV-Wuhan | CTTCACCAGGGGCGTGTACTACCCCGACAAGGTGTTCAGGAGCAGC | |
| Spike(2 proline | GTGCTGCACAGCACCCAGGACCTGTTCCTGCCCTTCTTCAGCAACGT | |
| substitution)- | GACCTGGTTCCACGCCATCCACGTGAGCGGCACCAACGGCACCAAG | |
| Influenza (HA) | AGGTTCGACAACCCCGTGCTGCCCTTCAACGACGGCGTGTACTTCG | |
| | CCAGCACCGAGAAGAGCAACATCATCAGGGGCTGGATCTTCGGCAC | |
| | CACCCTGGACAGCAAGACCCAGAGCCTGCTGATCGTGAACAACGCC | |
| | ACCAACGTGGTGATCAAGGTGTGCGAGTTCCAGTTCTGCAACGACCC | |
| | CTTCCTGGGCGTGTACTACCACAAGAACAACAAGAGCTGGATGGAGA | |
| | GCGAGTTCAGGGTGTACAGCAGCGCCAACAACTGCACCTTCGAGTA | |
| | CGTGAGCCAGCCCTTCCTGATGGACCTGGAGGGCAAGCAGGGCAAC | |
| | TTCAAGAACCTGAGGGAGTTCGTGTTCAAGAACATCGACGGCTACTT | |
| | CAAGATCTACAGCAAGCACACCCCCATCAACCTGGTGAGGGACCTG | |
| | CCCCAGGGCTTCAGCGCCCTGGAGCCCCTGGTGGACCTGCCCATCG | |
| | GCATCAACATCACCAGGTTCCAGACCCTGCTGGCCCTGCACAGGAG | |
| | CTACCTGACCCCCGGCGACAGCAGCAGCGGCTGGACCGCCGGCGC | |
| | CGCCGCCTACTACGTGGGCTACCTGCAGCCCAGGACCTTCCTGCTG | |
| | AAGTACAACGAGAACGGCACCATCACCGACGCCGTGGACTGCGCCC | |
| | TGGACCCCCTGAGCGAGACCAAGTGCACCCTGAAGAGCTTCACCGT | |
| | GGAGAAGGGCATCTACCAGACCAGCAACTTCAGGGTGCAGCCCACC | |
| | GAGAGCATCGTGAGGTTCCCCAACATCACCAACCTGTGCCCCTTCG | |
| | GCGAGGTGTTCAACGCCACCAGGTTCGCCAGCGTGTACGCCTGGAA | |
| | CAGGAAGAGGATCAGCAACTGCGTGGCCGACTACAGCGTGCTGTAC | |
| | AACAGCGCCAGCTTCAGCACCTTCAAGTGCTACGGCGTGAGCCCCA | |
| | CCAAGCTGAACGACCTGTGCTTCACCAACGTGTACGCCGACAGCTTC | |
| | GTGATCAGGGGCGACGAGGTGAGGCAGATCGCCCCCGGCCAGACC | |
| | GGCAAGATCGCCGACTACAACTACAAGCTGCCCGACGACTTCACCG | |
| | GCTGCGTGATCGCCTGGAACAGCAACAACCTGGACAGCAAGGTGGG | |
| | CGGCAACTACAACTACCTGTACAGGCTGTTCAGGAAGAGCAACCTGA | |
| | AGCCCTTCGAGAGGGACATCAGCACCGAGATCTACCAGGCCGGCAG | |
| | CACCCCCTGCAACGGCGTGGAGGGCTTCAACTGCTACTTCCCCCTG | |
| | CAGAGCTACGGCTTCCAGCCCACCAACGGCGTGGGCTACCAGCCCT | |
| | ACAGGGTGGTGGTGCTGAGCTTCGAGCTGCTGCACGCCCCCGCCAC | |
| | CGTGTGCGGCCCCAAGAAGAGCACCAACCTGGTGAAGAACAAGTGC | |
| | GTGAACTTCAACTTCAACGGCCTGACCGGCACCGGCGTGCTGACCG | |
| | AGAGCAACAAGAAGTTCCTGCCCTTCCAGCAGTTCGGCAGGGACAT | |
| | CGCCGACACCACCGACGCCGTGAGGGACCCCCAGACCCTGGAGAT | |
| | CCTGGACATCACCCCCTGCAGCTTCGGCGGCGTGAGCGTGATCACC | |
| | CCCGGCACCAACACCAGCAACCAGGTGGCCGTGCTGTACCAGGACG | |
| | TGAACTGCACCGAGGTGCCCGTGGCCATCCACGCCGACCAGCTGAC | |
| | CCCCACCTGGAGGGTGTACAGCACCGGCAGCAACGTGTTCCAGACC | |
| | AGGGCCGGCTGCCTGATCGGCGCCGAGCACGTGAACAACAGCTAC | |
| | GAGTGCGACATCCCCATCGGCGCCGGCATCTGCGCCAGCTACCAGA | |
| | CCCAGACCAACAGCCCCAGGAGGGCCAGGAGCGTGGCCAGCCAGA | |
| | GCATCATCGCCTACACCATGAGCCTGGGCGCCGAGAACAGCGTGGC | |
| | CTACAGCAACAACAGCATCGCCATCCCCACCAACTTCACCATCAGCG | |
| | TGACCACCGAGATCCTGCCCGTGAGCATGACCAAGACCAGCGTGGA | |
| | CTGCACCATGTACATCTGCGGCGACAGCACCGAGTGCAGCAACCTG | |
| | CTGCTGCAGTACGGCAGCTTCTGCACCCAGCTGAACAGGGCCCTGA | |
| | CCGGCATCGCCGTGGAGCAGGACAAGAACACCCAGGAGGTGTTCGC | |
| | CCAGGTGAAGCAGATCTACAAGACCCCCCCCATCAAGGACTTCGGC | |
| | GGCTTCAACTTCAGCCAGATCCTGCCCGACCCCAGCAAGCCCAGCA | |
| | AGAGGAGCTTCATCGAGGACCTGCTGTTCAACAAGGTGACCCTGGC | |
| | CGACGCCGGCTTCATCAAGCAGTACGGCGACTGCCTGGGCGACATC | |
| | GCCGCCAGGGACCTGATCTGCGCCCAGAAGTTCAACGGCCTGACCG | |
| | TGCTGCCCCCCCTGCTGACCGACGAGATGATCGCCCAGTACACCAG | |
| | CGCCCTGCTGGCCGGCACCATCACCAGCGGCTGGACCTTCGGCGC | |
| | CGGCGCCGCCCTGCAGATCCCCTTCGCCATGCAGATGGCCTACAGG | |
| | TTCAACGGCATCGGCGTGACCCAGAACGTGCTGTACGAGAACCAGA | |
| | AGCTGATCGCCAACCAGTTCAACAGCGCCATCGGCAAGATCCAGGA | |
| | CAGCCTGAGCAGCACCGCCAGCGCCCTGGGCAAGCTGCAGGACGT | |
| | GGTGAACCAGAACGCCCAGGCCCTGAACACCCTGGTGAAGCAGCTG | |
| | AGCAGCAACTTCGGCGCCATCAGCAGCGTGCTGAACGACATCCTGA | |
| | GCAGGCTGGACCCCCCCGAGGCCGAGGTGCAGATCGACAGGCTGA | |
| | TCACCGGCAGGCTGCAGAGCCTGCAGACCTACGTGACCCAGCAGCT | |
| | GATCAGGGCCGCCGAGATCAGGGCCAGCGCCAACCTGGCCGCCAC | |
| | CAAGATGAGCGAGTGCGTGCTGGGCCAGAGCAAGAGGGTGGACTTC | |
| | TGCGGCAAGGGCTACCACCTGATGAGCTTCCCCCAGAGCGCCCCCC | |
| | ACGGCGTGGTGTTCCTGCACGTGACCTACGTGCCCGCCCAGGAGAA | |
| | GAACTTCACCACCGCCCCCGCCATCTGCCACGACGGCAAGGCCCAC | |
| | TTCCCCAGGGAGGGCGTGTTCGTGAGCAACGGCACCCACTGGTTCG | |
| | TGACCCAGAGGAACTTCTACGAGCCCCAGATCATCACCACCGACAAC | |
| | ACCTTCGTGAGCGGCAACTGCGACGTGGTGATCGGCATCGTGAACA | |
| | ACACCGTGTACGACCCCCTGCAGCCCGAGCTGGACAGCTTCAAGGA | |
| | GGAGCTGGACAAGTACTTCAAGAACCACACCAGCCCCGACGTGGAC | |
| | CTGGGCGACATCAGCGGCATCAACGCCAGCGTGGTGAACATCCAGA | |
| | AGGAGATCGACAGGCTGAACGAGGTGGCCAAGAACCTGAACGAGAG | |
| | CCTGATCGACCTGCAGGAGCTGGGCAAGTACGAGCAGTACATCAAG | |
| | TGGCCCTGGTACATCTGGCTGGGCTTCATCGCCGGCCTGATCGCCA | |
| | TCGTGATGGTGACCATCATGCTGTGCTGCATGACCAGCTGCTGCAGC | |
| | TGCCTGAAGGGCTGCTGCAGCTGCGGCAGCTGCTGCAAGTTCGACG | |
| | AGGACGACAGCGAGCCCGTGCTGAAGGGCGTGAAGCTGCACTACAC | |
| | CGGAAGCGGAGCCACGAACTTCTCTCTGTTAAAGCAAGCAGGAGAT | |
| | GTTGAAGAAAACCCCGGGCCTATGAAGGCAATACTAGTAGTTCTGCT | |
| | ATATACATTTGCAACCGCAAATGCAGACACATTATGTATAGGTTATCA | |
| | TGCGAACAACTCAACAGACACTGTAGACACAGTACTAGAAAAGAATG | |
| | TAACAGTAACACACTCTGTTAACCTTCTAGAAGACAAGCATAACGGGA | |
| | AACTATGCAAACTAAGAGGGGTAGCCCCATTGCATTTGGGTAAATGT | |
| | AACATTGCTGGCTGGATCCTGGGAAATCCAGAGTGTGAATCACTCTC | |
| | CACAGCAAGCTCATGGTCCTACATTGTGGAAACATCTAGTTCAGACA | |
| | ATGGAACGTGTTACCCAGGAGATTTCATCGATTATGAGGAGCTAAGA | |
| | GAGCAATTGAGCTCAGTGTCATCATTTGAAAGGTTTGAGATATTCCCC | |
| | AAGACAAGTTCATGGCCCAATCATGACTCGAACAAAGGTGTAACGAC | |
| | AGCATGTCCTCATGCTGGAGCAAAAAGCTTCTACAAAAATTTAATATG | |
| | GCTAGTTAAAAAAGGAAATTCATACCCAAAGCTCAGCAAATCCTACAT | |
| | TAATGATAAAGGGAAAGAAGTCCTCGTGCTATGGGGCATTCACCATC | |
| | CACCTACTAGTGCTGACCAACAAAGTCTCTATCAGAATGCAGATGCA | |
| | TATGTTTTTGTGGGGACATCAAGATACAGCAAGAAGTTCAAGCCGGA | |
| | AATAGCAATAAGGCCCAAAGTGAGGGATCAAGAAGGGAGAATGAACT | |
| | ATTACTGGACACTAGTAGAGCCGGGAGACAAAATAACATTCGAAGCA | |
| | ACTGGAAATCTAGTGGTACCGAGATATGCATTCGCAATGGAAAGAAA | |
| | TGCTGGATCTGGTATTATCATTTCAGATACACCAGTCCACGATTGCAA | |
| | TACAACTTGTCAGACACCCAAGGGTGCTATAAACACCAGCCTCCCAT | |
| | TTCAGAACATACATCCGATCACAATTGGAAAATGTCCAAAATATGTAA | |
| | AAAGCACAAAATTGAGACTGGCCACAGGATTGAGGAATGTCCCGTCC | |
| | ATTCAATCTAGAGGCCTATTTGGGGCCATTGCCGGTTTCATTGAAGG | |
| | GGGGTGGACAGGGATGGTAGATGGATGGTACGGTTATCACCATCAA | |
| | AATGAGCAGGGGTCAGGATATGCAGCCGACCTGAAGAGCACACAGA | |
| | ATGCCATTGACGAGATTACTAACAAAGTAAACTCTGTTATTGAAAAAA | |
| | TGAATACACAGTTCACAGCAGTAGGTAAAGAGTTCAACCACCTGGAA | |
| | AAAAGAATAGAGAATTTAAATAAAAAAGTTGATGATGGTTTCCTGGAC | |
| | ATTTGGACTTACAATGCCGAACTGTTGGTTCTATTGGAAAATGAAAGA | |
| | ACTTTGGACTACCACGATTCAAAGGTGAAGAACTTATATGAAAAGGTA | |
| | AGAAGCCAGTTAAAAAACAATGCCAAGGAAATTGGAAACGGCTGCTT | |
| | TGAATTTTACCACAAATGTGATAACACGTGCATGGAAAGTGTCAAAAA | |
| | TGGGACTTATGACTACCCAAAATACTCAGAGGAAGCAAAATTAAACA | |
| | GAGAAGAAATAGATGGGGTAAAGCTGGAATCAACAAGGATTTACCAG | |
| | ATTTTGGCGATCTATTCAACCGTCGCCAGTTCATTGGTACTGGTAGTC | |
| | TCCCTGGGGGCAATCAGTTTCTGGATGTGCTCTAATGGGTCTCTACA | |
| | GTGTAGAATATGTATTTAAGGAAGCGGAGCCACGAACTTCTCTCTGTT | |
| | AAAGCAAGCAGGAGATGTTGAAGAAAACCCCGGGCCTAGCAAAAGC | |
| | AGGGGATAATTCTATTAACCATGAAGACTATCATTGCTTTGAGCTACA | |
| | TTCTATGTCTGGTTTTCGCTCAAAAACTTCCTGGAAATGACAATAGCA | |
| | CTGCAACGCTGTGCCTTGGGCACCATGCAGTACCAAACGGAACGAT | |
| | AGTGAAAACAATCACGAATGACCAAATTGAAGTTACTAATGCTACTGA | |
| | GCTGGTTCAGAATTCCTCAATAGGTGAAATATGCGACAGTCCTCATC | |
| | AGATCCTTGATGGAGAAAACTGCACACTAATAGATGCTCTATTGGGA | |
| | GACCCTCAGTGTGATGGCTTTCAAAATAAGAAATGGGACCTTTTTGTT | |
| | GAACGAAGCAAAGCCTACAGCAACTGTTACCCTTATGATGTGCCGGA | |
| | TTATGCCTCCCTTAGGTCACTAGTTGCCTCATCCGGCACACTGGAGT | |
| | TTAACAATGAAAGCTTCAATTGGGCTGGAGTCACTCAAAACGGAACA | |
| | AGTTCTGCTTGCATAAGGGGATCTAATAGTAGTTTCTTTAGTAGATTA | |
| | AATTGGTTGACCCACTTAAACTTCAAGTACCCAGCATTGAACGTGACT | |
| | ATGCCAAACAATGAACAATTTGACAAATTGTACATTTGGGGGGTTCAC | |
| | CACCCGGGTACGGACAAGGACCAAATCTTCCTGTATGCTCAATCATC | |
| | AGGAAGAATCACAGTATCTACCAAAAGAAGCCAACAAGCTGTAATCC | |
| | CGAATATCGGATCTAGACCCAGAATAAGGAATATCCCTAGCAGAATA | |
| | AGCATCTATTGGACAATAGTAAAACCGGGAGACATACTTTTGATTAAC | |
| | AGCACAGGGAATCTAATTGCTCCTAGGGGTTACTTCAAAATACGAAG | |
| | TGGGAAAAGCTCAATAATGAGATCAGATGCACCCATTGGCAAATGCA | |
| | AGTCTGAATGCATCACTCCAAATGGAAGCATTCCCAATGACAAACCAT | |
| | TCCAAAATGTAAACAGGATCACATACGGGGCCTGTCCCAGATATGTT | |
| | AAGCAAAGCACTCTGAAATTGGCAACAGGAATGCGAAATGTACCAGA | |
| | GAAACAAACTAGAGGCATATTTGGCGCAATAGCGGGTTTCATAGAAA | |
| | ATGGTTGGGAGGGAATGGTGGATGGTTGGTACGGTTTCAGGCATCA | |
| | AAATTCTGAGGGAAGAGGACAAGCAGCAGATCTCAAAAGCACTCAAG | |
| | CAGCAATCGATCAAATCAATGGGAAGCTGAATCGATTGATCGGGAAA | |
| | ACCAACGAGAAATTCCATCAGATTGAGAAAGAATTCTCAGAAGTAGAA | |
| | GGGAGAATTCAGGACCTTGAGAAATATGTTGAGGACACAAAAATAGA | |
| | TCTCTGGTCATACAACGCAGAGCTTCTTGTTGCCCTGGAAAACCAAC | |
| | ATACAATTGATCTAACTGACTCAGAAATGAACAAACTGTTTGAAAAAA | |
| | CAAAGAAGCAACTGAGGGAAAATGCTGAGGATATGGGCAATGGTTGT | |
| | TTCAAAATATACCACAAATGTGACAATGCCTGCATAGGATCAATCAGA | |
| | AATGGAACTTATGACCACGATGTATACAGGGATGAAGCATTAAACAA | |
| | CCGGTTCCAGATCAAGGGAGTTGAGCTGAAGTCAGGGTACAAAGATT | |
| | GGATCCTATGGATTTCCTTTGCCATATCATGTTTTTTGCTTTGTGTTGC | |
| | TTTGTTGGGGTTCATCATGTGGGCCTGCCAAAAGGGCAACATTAGGT | |
| | GCAACATTTGCATTTGAGTGCATTAATTAAAAACACCCTTGTTTCTACT | |
| | GGAAGCGGAGCCACGAACTTCTCTCTGTTAAAGCAAGCAGGAGATGT | |
| | TGAAGAAAACCCCGGGCCTATTTTCTAATATCCACAAAATGAAGGCAA | |
| | TAATTGTACTACTCATGGTAGTAACATCCAATGCAGATCGAATCTGCA | |
| | CTGGGATAACATCGTCAAACTCACCACATGTCGTCAAAACTGCTACT | |
| | CAAGGGGAGGTCAACGTGACCGGTGTAATACCACTGACAACAACAC | |
| | CCACCAAATCTCATTTTGCAAATCTCAAAGGAACAGAAACCAGGGGG | |
| | AAACTATGCCCAAAATGCCTCAACTGCACAGATCTGGATGTAGCCTT | |
| | GGGCAGACCAAAATGCACAGGGAAAATACCCTCTGCAAGGGTTTCAA | |
| | TACTCCATGAAGTCAGACCTGTTACATCTGGGTGCTTTCCTATAATGC | |
| | ACGATAGAACAAAAATTAGACAGCTGCCTAACCTTCTCCGAGGATAC | |
| | GAACATGTCAGGTTATCAACTCACAACGTTATCAATGCAAAAGATGCA | |
| | CCAGGAAGACCCTACGAAATTGGAACCTCAGGGTCTTGCCCTAACAT | |
| | TACCAATGGAAACGGATTCTTCGCAACAATGGCTTGGGCCGTCCCAA | |
| | AAAACAAAACAGCAACAAATCCATTAACAATAGAAGTACCATACATTT | |
| | GTACAGAAGGAGAAGACCAAATTACCGTTTGGGGGTTCCACTCTGAC | |
| | AACGAGACCCAAATGGCAAAGCTCTATGGGGACTCAAAGCCCCAGA | |
| | AGTTCACCTCATCTGCCAACGGAGTGACCACACATTACGTTTCACAG | |
| | ATTGGTGGCTTCCCAAATCAAACAGAAGACGGAGGACTACCACAAAG | |
| | TGGCAGAATTGTTGTTGATTACATGGTGCAGAAATCTGGAAAAACAG | |
| | GAACAATTACCTATCAAAGAGGTATTTTATTGCCTCAAAAAGTGTGGT | |
| | GCGCAAGTGGCAGGAGCAAGGTAATAAAAGGATCCTTGCCCTTAATT | |
| | GGAGAAGCAGATTGCCTCCATGAAAAATACGGTGGATTAAACAAAAG | |
| | CAAGCCTTACTACACAGGGGAACATGCAAAGGCCATAGGAAATTGCC | |
| | CAATATGGGTGAAAACACCCTTGAAGCTGGCCAATGGAACCAAATAT | |
| | AGACCCCCTGCAAAACTATTAAAGGAAAGAGGTTTCTTCGGAGCCAT | |
| | TGCTGGTTTCTTAGAGGGAGGATGGGAAGGAATGATTGCAGGTTGG | |
| | CACGGATACACATCCCATGGGGCACATGGAGTAGCGGTGGCAGCTG | |
| | ACCTTAAGAGCACTCAAGAGGCCATAAACAAGATAACAAAAAATCTCA | |
| | ACTCTTTGAGTGAGCTGGAAGTAAAGAATCTTCAAAGACTAAGCGGT | |
| | GCCATGGATGAACTCCACAACGAAATACTAGAACTAGATGAGAAAGT | |
| | GGATGATCTCAGAGCTGACACAATAAGCTCACAAATAGAACTCGCAG | |
| | TCCTGCTTTCCAATGAAGGAATAATAAACAGTGAAGATGAACATCTCT | |
| | TGGCGCTTGAAAGAAAGCTGAAGAAAATGCTGGGCCCCTCTGCTGTA | |
| | GAGATAGGGAATGGATGCTTTGAAACCAAACACAAGTGCAACCAGAC | |
| | CTGCCTCGACAGAATAGCTGCTGGTACCTTTGATGCAGGAGAATTTT | |
| | CTCTCCCCACCTTTGATTCACTGAATATTACTGCTGCATCTTTAAATG | |
| | ACGACGGATTGGACAATCATACTATACTGCTTTACTACTCAACTGCTG | |
| | CCTCCAGTTTGGCTGTAACACTGATGATAGCTATCTTTGTTGTTTATA | |
| | TGGTCTCCAGAGACAATGTTTCTTGCTCCATTTGTCTATAAGGAAAGT | |
| | TAAGCCCTGTATTTTCCTTTATTGTAGTGCTTGTTTGCTTGTTGTCATT | |
| | ACAAAGAAACGTTATTGAAAAATGGAAGCGGAGCCACGAACTTCTCT | |
| | CTGTTAAAGCAAGCAGGAGATGTTGAAGAAAACCCCGGGCCTTTCGG | |
| | AGCTATTGCTGGTTTCTTGGAAGGAGGATGGGAAGGAATGATTGCAG | |
| | GTTGGCACGGATACACATCTCATGGAGCACATGGAGTAGCAGTGGC | |
| | AGCAGACCTTAAGAGTACCCATGATGA | |
| Pan-CoV-Flu | ATGTTCGTGTTCCTGGTGCTGCTGCCCCTGGTGAGCAGCCAGTGCG | 415 |
| Vaccine #27 | TGAACCTGATCACCAGGACCCAGAGCTACACCAACAGCTTCACCAGG | |
| CoV- Omicron | GGCGTGTACTACCCCGACAAGGTGTTCAGGAGCAGCGTGCTGCACA | |
| BA.2 | GCACCCAGGACCTGTTCCTGCCCTTCTTCAGCAACGTGACCTGGTTC | |
| Spike(HexaPra)- | CACGCCATCCACGTGAGCGGCACCAACGGCACCAAGAGGTTCGACA | |
| Influenza (HA) | ACCCCGTGCTGCCCTTCAACGACGGCGTGTACTTCGCCAGCACCGA | |
| | GAAGAGCAACATCATCAGGGGCTGGATCTTCGGCACCACCCTGGAC | |
| | AGCAAGACCCAGAGCCTGCTGATCGTGAACAACGCCACCAACGTGG | |
| | TGATCAAGGTGTGCGAGTTCCAGTTCTGCAACGACCCCTTCCTGGAC | |
| | GTGTACTACCACAAGAACAACAAGAGCTGGATGGAGAGCGAGTTCA | |
| | GGGTGTACAGCAGCGCCAACAACTGCACCTTCGAGTACGTGAGCCA | |
| | GCCCTTCCTGATGGACCTGGAGGGCAAGCAGGGCAACTTCAAGAAC | |
| | CTGAGGGAGTTCGTGTTCAAGAACATCGACGGCTACTTCAAGATCTA | |
| | CAGCAAGCACACCCCCATCAACCTGGGCAGGGACCTGCCCCAGGGC | |
| | TTCAGCGCCCTGGAGCCCCTGGTGGACCTGCCCATCGGCATCAACA | |
| | TCACCAGGTTCCAGACCCTGCTGGCCCTGCACAGGAGCTACCTGAC | |
| | CCCCGGCGACAGCAGCAGCGGCTGGACCGCCGGCGCCGCCGCCTA | |
| | CTACGTGGGCTACCTGCAGCCCAGGACCTTCCTGCTGAAGTACAAC | |
| | GAGAACGGCACCATCACCGACGCCGTGGACTGCGCCCTGGACCCC | |
| | CTGAGCGAGACCAAGTGCACCCTGAAGAGCTTCACCGTGGAGAAGG | |
| | GCATCTACCAGACCAGCAACTTCAGGGTGCAGCCCACCGAGAGCAT | |
| | CGTGAGGTTCCCCAACATCACCAACCTGTGCCCCTTCGACGAGGTGT | |
| | TCAACGCCACCAGGTTCGCCAGCGTGTACGCCTGGAACAGGAAGAG | |
| | GATCAGCAACTGCGTGGCCGACTACAGCGTGCTGTACAACTTCGCC | |
| | CCCTTCTTCGCCTTCAAGTGCTACGGCGTGAGCCCCACCAAGCTGAA | |
| | CGACCTGTGCTTCACCAACGTGTACGCCGACAGCTTCGTGATCAGG | |
| | GGCAACGAGGTGAGCCAGATCGCCCCCGGCCAGACCGGCAACATC | |
| | GCCGACTACAACTACAAGCTGCCCGACGACTTCACCGGCTGCGTGA | |
| | TCGCCTGGAACAGCAACAAGCTGGACAGCAAGGTGGGCGGCAACTA | |
| | CAACTACCTGTACAGGCTGTTCAGGAAGAGCAACCTGAAGCCCTTCG | |
| | AGAGGGACATCAGCACCGAGATCTACCAGGCCGGCAACAAGCCCTG | |
| | CAACGGCGTGGCCGGCTTCAACTGCTACTTCCCCCTGAGGAGCTAC | |
| | GGCTTCAGGCCCACCTACGGCGTGGGCCACCAGCCCTACAGGGTG | |
| | GTGGTGCTGAGCTTCGAGCTGCTGCACGCCCCCGCCACCGTGTGCG | |
| | GCCCCAAGAAGAGCACCAACCTGGTGAAGAACAAGTGCGTGAACTT | |
| | CAACTTCAACGGCCTGACCGGCACCGGCGTGCTGACCGAGAGCAAC | |
| | AAGAAGTTCCTGCCCTTCCAGCAGTTCGGCAGGGACATCGCCGACA | |
| | CCACCGACGCCGTGAGGGACCCCCAGACCCTGGAGATCCTGGACAT | |
| | CACCCCCTGCAGCTTCGGCGGCGTGAGCGTGATCACCCCCGGCACC | |
| | AACACCAGCAACCAGGTGGCCGTGCTGTACCAGGGCGTGAACTGCA | |
| | CCGAGGTGCCCGTGGCCATCCACGCCGACCAGCTGACCCCCACCTG | |
| | GAGGGTGTACAGCACCGGCAGCAACGTGTTCCAGACCAGGGCCGG | |
| | CTGCCTGATCGGCGCCGAGTACGTGAACAACAGCTACGAGTGCGAC | |
| | ATCCCCATCGGCGCCGGCATCTGCGCCAGCTACCAGACCCAGACCA | |
| | AGAGCCACCAGCAGGCCCAGAGCGTGGCCAGCCAGAGCATCATCG | |
| | CCTACACCATGAGCCTGGGCGCCGAGAACAGCGTGGCCTACAGCAA | |
| | CAACAGCATCGCCATCCCCACCAACTTCACCATCAGCGTGACCACCG | |
| | AGATCCTGCCCGTGAGCATGACCAAGACCAGCGTGGACTGCACCAT | |
| | GTACATCTGCGGCGACAGCACCGAGTGCAGCAACCTGCTGCTGCAG | |
| | TACGGCAGCTTCTGCACCCAGCTGAAGAGGGCCCTGACCGGCATCG | |
| | CCGTGGAGCAGGACAAGAACACCCAGGAGGTGTTCGCCCAGGTGAA | |
| | GCAGATCTACAAGACCCCCCCCATCAAGTACTTCGGCGGCTTCAACT | |
| | TCAGCCAGATCCTGCCCGACCCCAGCAAGCCCAGCAAGAGGAGCCC | |
| | CATCGAGGACCTGCTGTTCAACAAGGTGACCCTGGCCGACGCCGGC | |
| | TTCATCAAGCAGTACGGCGACTGCCTGGGCGACATCGCCGCCAGGG | |
| | ACCTGATCTGCGCCCAGAAGTTCAACGGCCTGACCGTGCTGCCCCC | |
| | CCTGCTGACCGACGAGATGATCGCCCAGTACACCAGCGCCCTGCTG | |
| | GCCGGCACCATCACCAGCGGCTGGACCTTCGGCGCCGGCCCCGCC | |
| | CTGCAGATCCCCTTCCCCATGCAGATGGCCTACAGGTTCAACGGCAT | |
| | CGGCGTGACCCAGAACGTGCTGTACGAGAACCAGAAGCTGATCGCC | |
| | AACCAGTTCAACAGCGCCATCGGCAAGATCCAGGACAGCCTGAGCA | |
| | GCACCCCCAGCGCCCTGGGCAAGCTGCAGGACGTGGTGAACCACAA | |
| | CGCCCAGGCCCTGAACACCCTGGTGAAGCAGCTGAGCAGCAAGTTC | |
| | GGCGCCATCAGCAGCGTGCTGAACGACATCCTGAGCAGGCTGGACC | |
| | CCCCCGAGGCCGAGGTGCAGATCGACAGGCTGATCACCGGCAGGC | |
| | TGCAGAGCCTGCAGACCTACGTGACCCAGCAGCTGATCAGGGCCGC | |
| | CGAGATCAGGGCCAGCGCCAACCTGGCCGCCACCAAGATGAGCGA | |
| | GTGCGTGCTGGGCCAGAGCAAGAGGGTGGACTTCTGCGGCAAGGG | |
| | CTACCACCTGATGAGCTTCCCCCAGAGCGCCCCCCACGGCGTGGTG | |
| | TTCCTGCACGTGACCTACGTGCCCGCCCAGGAGAAGAACTTCACCA | |
| | CCGCCCCCGCCATCTGCCACGACGGCAAGGCCCACTTCCCCAGGGA | |
| | GGGCGTGTTCGTGAGCAACGGCACCCACTGGTTCGTGACCCAGAGG | |
| | AACTTCTACGAGCCCCAGATCATCACCACCGACAACACCTTCGTGAG | |
| | CGGCAACTGCGACGTGGTGATCGGCATCGTGAACAACACCGTGTAC | |
| | GACCCCCTGCAGCCCGAGCTGGACAGCTTCAAGGAGGAGCTGGACA | |
| | AGTACTTCAAGAACCACACCAGCCCCGACGTGGACCTGGGCGACAT | |
| | CAGCGGCATCAACGCCAGCGTGGTGAACATCCAGAAGGAGATCGAC | |
| | AGGCTGAACGAGGTGGCCAAGAACCTGAACGAGAGCCTGATCGACC | |
| | TGCAGGAGCTGGGCAAGTACGAGCAGTACATCAAGTGGCCCTGGTA | |
| | CATCTGGCTGGGCTTCATCGCCGGCCTGATCGCCATCGTGATGGTG | |
| | ACCATCATGCTGTGCTGCATGACCAGCTGCTGCAGCTGCCTGAAGG | |
| | GCTGCTGCAGCTGCGGCAGCTGCTGCAAGTTCGACGAGGACGACAG | |
| | CGAGCCCGTGCTGAAGGGCGTGAAGCTGCACTACACCGGAAGCGG | |
| | AGCCACGAACTTCTCTCTGTTAAAGCAAGCAGGAGATGTTGAAGAAA | |
| | ACCCCGGGCCTATGAAGGCAATACTAGTAGTTCTGCTATATACATTTG | |
| | CAACCGCAAATGCAGACACATTATGTATAGGTTATCATGCGAACAACT | |
| | CAACAGACACTGTAGACACAGTACTAGAAAAGAATGTAACAGTAACA | |
| | CACTCTGTTAACCTTCTAGAAGACAAGCATAACGGGAAACTATGCAAA | |
| | CTAAGAGGGGTAGCCCCATTGCATTTGGGTAAATGTAACATTGCTGG | |
| | CTGGATCCTGGGAAATCCAGAGTGTGAATCACTCTCCACAGCAAGCT | |
| | CATGGTCCTACATTGTGGAAACATCTAGTTCAGACAATGGAACGTGTT | |
| | ACCCAGGAGATTTCATCGATTATGAGGAGCTAAGAGAGCAATTGAGC | |
| | TCAGTGTCATCATTTGAAAGGTTTGAGATATTCCCCAAGACAAGTTCA | |
| | TGGCCCAATCATGACTCGAACAAAGGTGTAACGACAGCATGTCCTCA | |
| | TGCTGGAGCAAAAAGCTTCTACAAAAATTTAATATGGCTAGTTAAAAA | |
| | AGGAAATTCATACCCAAAGCTCAGCAAATCCTACATTAATGATAAAGG | |
| | GAAAGAAGTCCTCGTGCTATGGGGCATTCACCATCCACCTACTAGTG | |
| | CTGACCAACAAAGTCTCTATCAGAATGCAGATGCATATGTTTTTGTGG | |
| | GGACATCAAGATACAGCAAGAAGTTCAAGCCGGAAATAGCAATAAGG | |
| | CCCAAAGTGAGGGATCAAGAAGGGAGAATGAACTATTACTGGACACT | |
| | AGTAGAGCCGGGAGACAAAATAACATTCGAAGCAACTGGAAATCTAG | |
| | TGGTACCGAGATATGCATTCGCAATGGAAAGAAATGCTGGATCTGGT | |
| | ATTATCATTTCAGATACACCAGTCCACGATTGCAATACAACTTGTCAG | |
| | ACACCCAAGGGTGCTATAAACACCAGCCTCCCATTTCAGAACATACA | |
| | TCCGATCACAATTGGAAAATGTCCAAAATATGTAAAAAGCACAAAATT | |
| | GAGACTGGCCACAGGATTGAGGAATGTCCCGTCCATTCAATCTAGAG | |
| | GCCTATTTGGGGCCATTGCCGGTTTCATTGAAGGGGGGTGGACAGG | |
| | GATGGTAGATGGATGGTACGGTTATCACCATCAAAATGAGCAGGGGT | |
| | CAGGATATGCAGCCGACCTGAAGAGCACACAGAATGCCATTGACGA | |
| | GATTACTAACAAAGTAAACTCTGTTATTGAAAAAATGAATACACAGTTC | |
| | ACAGCAGTAGGTAAAGAGTTCAACCACCTGGAAAAAAGAATAGAGAA | |
| | TTTAAATAAAAAAGTTGATGATGGTTTCCTGGACATTTGGACTTACAAT | |
| | GCCGAACTGTTGGTTCTATTGGAAAATGAAAGAACTTTGGACTACCA | |
| | CGATTCAAAGGTGAAGAACTTATATGAAAAGGTAAGAAGCCAGTTAAA | |
| | AAACAATGCCAAGGAAATTGGAAACGGCTGCTTTGAATTTTACCACAA | |
| | ATGTGATAACACGTGCATGGAAAGTGTCAAAAATGGGACTTATGACT | |
| | ACCCAAAATACTGAGAGGAAGGAAAATTAAACAGAGAAGAAATAGAT | |
| | GGGGTAAAGCTGGAATCAACAAGGATTTACCAGATTTTGGCGATCTA | |
| | TTCAACCGTCGCCAGTTCATTGGTACTGGTAGTCTCCCTGGGGGCAA | |
| | TCAGTTTCTGGATGTGCTCTAATGGGTCTCTACAGTGTAGAATATGTA | |
| | TTTAAGGAAGCGGAGCCACGAACTTCTCTCTGTTAAAGCAAGCAGGA | |
| | GATGTTGAAGAAAACCCCGGGCCTAGCAAAAGCAGGGGATAATTCTA | |
| | TTAACCATGAAGACTATCATTGCTTTGAGCTACATTCTATGTCTGGTTT | |
| | TCGCTCAAAAACTTCCTGGAAATGACAATAGCACTGCAACGCTGTGC | |
| | CTTGGGCACCATGCAGTACCAAACGGAACGATAGTGAAAACAATCAC | |
| | GAATGACCAAATTGAAGTTACTAATGCTACTGAGCTGGTTCAGAATTC | |
| | CTCAATAGGTGAAATATGCGACAGTCCTCATCAGATCCTTGATGGAG | |
| | AAAACTGCACACTAATAGATGCTCTATTGGGAGACCCTCAGTGTGAT | |
| | GGCTTTCAAAATAAGAAATGGGACCTTTTTGTTGAACGAAGCAAAGC | |
| | CTACAGCAACTGTTACCCTTATGATGTGCCGGATTATGCCTCCCTTAG | |
| | GTCACTAGTTGCCTCATCCGGCACACTGGAGTTTAACAATGAAAGCT | |
| | TCAATTGGGCTGGAGTCACTCAAAACGGAACAAGTTCTGCTTGCATA | |
| | AGGGGATCTAATAGTAGTTTCTTTAGTAGATTAAATTGGTTGACCCAC | |
| | TTAAACTTCAAGTACCCAGCATTGAACGTGACTATGCCAAACAATGAA | |
| | CAATTTGACAAATTGTACATTTGGGGGGTTCACCACCCGGGTACGGA | |
| | CAAGGACCAAATCTTCCTGTATGCTCAATCATCAGGAAGAATCACAGT | |
| | ATCTACCAAAAGAAGCCAACAAGCTGTAATCCCGAATATCGGATCTA | |
| | GACCCAGAATAAGGAATATCCCTAGCAGAATAAGCATCTATTGGACA | |
| | ATAGTAAAACCGGGAGACATACTTTTGATTAACAGCACAGGGAATCTA | |
| | ATTGCTCCTAGGGGTTACTTCAAAATACGAAGTGGGAAAAGCTCAAT | |
| | AATGAGATCAGATGCACCCATTGGCAAATGCAAGTCTGAATGCATCA | |
| | CTCCAAATGGAAGCATTCCCAATGACAAACCATTCCAAAATGTAAACA | |
| | GGATCACATACGGGGCCTGTCCCAGATATGTTAAGCAAAGCACTCTG | |
| | AAATTGGCAACAGGAATGCGAAATGTACCAGAGAAACAAACTAGAGG | |
| | CATATTTGGCGCAATAGCGGGTTTCATAGAAAATGGTTGGGAGGGAA | |
| | TGGTGGATGGTTGGTACGGTTTCAGGCATCAAAATTCTGAGGGAAGA | |
| | GGACAAGCAGCAGATCTCAAAAGCACTCAAGCAGCAATCGATCAAAT | |
| | CAATGGGAAGCTGAATCGATTGATCGGGAAAACCAACGAGAAATTCC | |
| | ATCAGATTGAGAAAGAATTCTCAGAAGTAGAAGGGAGAATTCAGGAC | |
| | CTTGAGAAATATGTTGAGGACACAAAAATAGATCTCTGGTCATACAAC | |
| | GCAGAGCTTCTTGTTGCCCTGGAAAACCAACATACAATTGATCTAACT | |
| | GACTCAGAAATGAACAAACTGTTTGAAAAAACAAAGAAGCAACTGAG | |
| | GGAAAATGCTGAGGATATGGGCAATGGTTGTTTCAAAATATACCACA | |
| | AATGTGACAATGCCTGCATAGGATCAATCAGAAATGGAACTTATGAC | |
| | CACGATGTATACAGGGATGAAGCATTAAACAACCGGTTCCAGATCAA | |
| | GGGAGTTGAGCTGAAGTCAGGGTACAAAGATTGGATCCTATGGATTT | |
| | CCTTTGCCATATCATGTTTTTTGCTTTGTGTTGCTTTGTTGGGGTTCAT | |
| | CATGTGGGCCTGCCAAAAGGGCAACATTAGGTGCAACATTTGCATTT | |
| | GAGTGCATTAATTAAAAACACCCTTGTTTCTACTGGAAGCGGAGCCA | |
| | CGAACTTCTCTCTGTTAAAGCAAGCAGGAGATGTTGAAGAAAACCCC | |
| | GGGCCTATTTTCTAATATCCACAAAATGAAGGCAATAATTGTACTACT | |
| | CATGGTAGTAACATCCAATGCAGATCGAATCTGCACTGGGATAACAT | |
| | CGTCAAACTCACCACATGTCGTCAAAACTGCTACTCAAGGGGAGGTC | |
| | AACGTGACCGGTGTAATACCACTGACAACAACACCCACCAAATCTCA | |
| | TTTTGCAAATCTCAAAGGAACAGAAACCAGGGGGAAACTATGCCCAA | |
| | AATGCCTCAACTGCACAGATCTGGATGTAGCCTTGGGCAGACCAAAA | |
| | TGCACAGGGAAAATACCCTCTGCAAGGGTTTCAATACTCCATGAAGT | |
| | CAGACCTGTTACATCTGGGTGCTTTCCTATAATGCACGATAGAACAAA | |
| | AATTAGACAGCTGCCTAACCTTCTCCGAGGATACGAACATGTCAGGT | |
| | TATCAACTCACAACGTTATCAATGCAAAAGATGCACCAGGAAGACCC | |
| | TACGAAATTGGAACCTCAGGGTCTTGCCCTAACATTACCAATGGAAA | |
| | CGGATTCTTCGCAACAATGGCTTGGGCCGTCCCAAAAAACAAAACAG | |
| | CAACAAATCCATTAACAATAGAAGTACCATACATTTGTACAGAAGGAG | |
| | AAGACCAAATTACCGTTTGGGGGTTCCACTCTGACAACGAGACCCAA | |
| | ATGGCAAAGCTCTATGGGGACTCAAAGCCCCAGAAGTTCACCTCATC | |
| | TGCCAACGGAGTGACCACACATTACGTTTCACAGATTGGTGGCTTCC | |
| | CAAATCAAACAGAAGACGGAGGACTACCACAAAGTGGCAGAATTGTT | |
| | GTTGATTACATGGTGCAGAAATCTGGAAAAACAGGAACAATTACCTAT | |
| | CAAAGAGGTATTTTATTGCCTCAAAAAGTGTGGTGCGCAAGTGGCAG | |
| | GAGCAAGGTAATAAAAGGATCCTTGCCCTTAATTGGAGAAGCAGATT | |
| | GCCTCCATGAAAAATACGGTGGATTAAACAAAAGCAAGCCTTACTAC | |
| | ACAGGGGAACATGCAAAGGCCATAGGAAATTGCCCAATATGGGTGAA | |
| | AACACCCTTGAAGCTGGCCAATGGAACCAAATATAGACCCCCTGCAA | |
| | AACTATTAAAGGAAAGAGGTTTCTTCGGAGCCATTGCTGGTTTCTTAG | |
| | AGGGAGGATGGGAAGGAATGATTGCAGGTTGGCACGGATACACATC | |
| | CCATGGGGCACATGGAGTAGCGGTGGCAGCTGACCTTAAGAGCACT | |
| | CAAGAGGCCATAAACAAGATAACAAAAAATCTCAACTCTTTGAGTGAG | |
| | CTGGAAGTAAAGAATCTTCAAAGACTAAGCGGTGCCATGGATGAACT | |
| | CCACAACGAAATACTAGAACTAGATGAGAAAGTGGATGATCTCAGAG | |
| | CTGACACAATAAGCTCACAAATAGAACTCGCAGTCCTGCTTTCCAATG | |
| | AAGGAATAATAAACAGTGAAGATGAACATCTCTTGGCGCTTGAAAGA | |
| | AAGCTGAAGAAAATGCTGGGCCCCTCTGCTGTAGAGATAGGGAATG | |
| | GATGCTTTGAAACCAAACACAAGTGCAACCAGACCTGCCTCGACAGA | |
| | ATAGCTGCTGGTACCTTTGATGCAGGAGAATTTTCTCTCCCCACCTTT | |
| | GATTCACTGAATATTACTGCTGCATCTTTAAATGACGACGGATTGGAC | |
| | AATCATACTATACTGCTTTACTACTCAACTGCTGCCTCCAGTTTGGCT | |
| | GTAACACTGATGATAGCTATCTTTGTTGTTTATATGGTCTCCAGAGAC | |
| | AATGTTTCTTGCTCCATTTGTCTATAAGGAAAGTTAAGCCCTGTATTTT | |
| | CCTTTATTGTAGTGCTTGTTTGCTTGTTGTCATTACAAAGAAACGTTAT | |
| | TGAAAAATTGATGA | |
| Pan-CoV-Flu | ATGTTCGTGTTCCTGGTGCTGCTGCCCCTGGTGAGCAGCCAGTGCG | 416 |
| Vaccine #28 | TGAACCTGATCACCAGGACCCAGAGCTACACCAACAGCTTCACCAGG | |
| CoV-Omicron | GGCGTGTACTACCCCGACAAGGTGTTCAGGAGCAGCGTGCTGCACA | |
| BA.2 Spike(2 | GCACCCAGGACCTGTTCCTGCCCTTCTTCAGCAACGTGACCTGGTTC | |
| proline | CACGCCATCCACGTGAGCGGCACCAACGGCACCAAGAGGTTCGACA | |
| substitution)- | ACCCCGTGCTGCCCTTCAACGACGGCGTGTACTTCGCCAGCACCGA | |
| Influenza (HA) | GAAGAGCAACATCATCAGGGGCTGGATCTTCGGCACCACCCTGGAC | |
| | AGCAAGACCCAGAGCCTGCTGATCGTGAACAACGCCACCAACGTGG | |
| | TGATCAAGGTGTGCGAGTTCCAGTTCTGCAACGACCCCTTCCTGGAC | |
| | GTGTACTACCACAAGAACAACAAGAGCTGGATGGAGAGCGAGTTCA | |
| | GGGTGTACAGCAGCGCCAACAACTGCACCTTCGAGTACGTGAGCCA | |
| | GCCCTTCCTGATGGACCTGGAGGGCAAGCAGGGCAACTTCAAGAAC | |
| | CTGAGGGAGTTCGTGTTCAAGAACATCGACGGCTACTTCAAGATCTA | |
| | CAGCAAGCACACCCCCATCAACCTGGGCAGGGACCTGCCCCAGGGC | |
| | TTCAGCGCCCTGGAGCCCCTGGTGGACCTGCCCATCGGCATCAACA | |
| | TCACCAGGTTCCAGACCCTGCTGGCCCTGCACAGGAGCTACCTGAC | |
| | CCCCGGCGACAGCAGCAGCGGCTGGACCGCCGGCGCCGCCGCCTA | |
| | CTACGTGGGCTACCTGCAGCCCAGGACCTTCCTGCTGAAGTACAAC | |
| | GAGAACGGCACCATCACCGACGCCGTGGACTGCGCCCTGGACCCC | |
| | CTGAGCGAGACCAAGTGCACCCTGAAGAGCTTCACCGTGGAGAAGG | |
| | GCATCTACCAGACCAGCAACTTCAGGGTGCAGCCCACCGAGAGCAT | |
| | CGTGAGGTTCCCCAACATCACCAACCTGTGCCCCTTCGACGAGGTGT | |
| | TCAACGCCACCAGGTTCGCCAGCGTGTACGCCTGGAACAGGAAGAG | |
| | GATCAGCAACTGCGTGGCCGACTACAGCGTGCTGTACAACTTCGCC | |
| | CCCTTCTTCGCCTTCAAGTGCTACGGCGTGAGCCCCACCAAGCTGAA | |
| | CGACCTGTGCTTCACCAACGTGTACGCCGACAGCTTCGTGATCAGG | |
| | GGCAACGAGGTGAGCCAGATCGCCCCCGGCCAGACCGGCAACATC | |
| | GCCGACTACAACTACAAGCTGCCCGACGACTTCACCGGCTGCGTGA | |
| | TCGCCTGGAACAGCAACAAGCTGGACAGCAAGGTGGGCGGCAACTA | |
| | CAACTACCTGTACAGGCTGTTCAGGAAGAGCAACCTGAAGCCCTTCG | |
| | AGAGGGACATCAGCACCGAGATCTACCAGGCCGGCAACAAGCCCTG | |
| | CAACGGCGTGGCCGGCTTCAACTGCTACTTCCCCCTGAGGAGCTAC | |
| | GGCTTCAGGCCCACCTACGGCGTGGGCCACCAGCCCTACAGGGTG | |
| | GTGGTGCTGAGCTTCGAGCTGCTGCACGCCCCCGCCACCGTGTGCG | |
| | GCCCCAAGAAGAGCACCAACCTGGTGAAGAACAAGTGCGTGAACTT | |
| | CAACTTCAACGGCCTGACCGGCACCGGCGTGCTGACCGAGAGCAAC | |
| | AAGAAGTTCCTGCCCTTCCAGCAGTTCGGCAGGGACATCGCCGACA | |
| | CCACCGACGCCGTGAGGGACCCCCAGACCCTGGAGATCCTGGACAT | |
| | CACCCCCTGCAGCTTCGGCGGCGTGAGCGTGATCACCCCCGGCACC | |
| | AACACCAGCAACCAGGTGGCCGTGCTGTACCAGGGCGTGAACTGCA | |
| | CCGAGGTGCCCGTGGCCATCCACGCCGACCAGCTGACCCCCACCTG | |
| | GAGGGTGTACAGCACCGGCAGCAACGTGTTCCAGACCAGGGCCGG | |
| | CTGCCTGATCGGCGCCGAGTACGTGAACAACAGCTACGAGTGCGAC | |
| | ATCCCCATCGGCGCCGGCATCTGCGCCAGCTACCAGACCCAGACCA | |
| | AGAGCCACCAGCAGGCCCAGAGCGTGGCCAGCCAGAGCATCATCG | |
| | CCTACACCATGAGCCTGGGCGCCGAGAACAGCGTGGCCTACAGCAA | |
| | CAACAGCATCGCCATCCCCACCAACTTCACCATCAGCGTGACCACCG | |
| | AGATCCTGCCCGTGAGCATGACCAAGACCAGCGTGGACTGCACCAT | |
| | GTACATCTGCGGCGACAGCACCGAGTGCAGCAACCTGCTGCTGCAG | |
| | TACGGCAGCTTCTGCACCCAGCTGAAGAGGGCCCTGACCGGCATCG | |
| | CCGTGGAGCAGGACAAGAACACCCAGGAGGTGTTCGCCCAGGTGAA | |
| | GCAGATCTACAAGACCCCCCCCATCAAGTACTTCGGCGGCTTCAACT | |
| | TCAGCCAGATCCTGCCCGACCCCAGCAAGCCCAGCAAGAGGAGCTT | |
| | CATCGAGGACCTGCTGTTCAACAAGGTGACCCTGGCCGACGCCGGC | |
| | TTCATCAAGCAGTACGGCGACTGCCTGGGCGACATCGCCGCCAGGG | |
| | ACCTGATCTGCGCCCAGAAGTTCAACGGCCTGACCGTGCTGCCCCC | |
| | CCTGCTGACCGACGAGATGATCGCCCAGTACACCAGCGCCCTGCTG | |
| | GCCGGCACCATCACCAGCGGCTGGACCTTCGGCGCCGGCGCCGCC | |
| | CTGCAGATCCCCTTCGCCATGCAGATGGCCTACAGGTTCAACGGCAT | |
| | CGGCGTGACCCAGAACGTGCTGTACGAGAACCAGAAGCTGATCGCC | |
| | AACCAGTTCAACAGCGCCATCGGCAAGATCCAGGACAGCCTGAGCA | |
| | GCACCGCCAGCGCCCTGGGCAAGCTGCAGGACGTGGTGAACCACA | |
| | ACGCCCAGGCCCTGAACACCCTGGTGAAGCAGCTGAGCAGCAAGTT | |
| | CGGCGCCATCAGCAGCGTGCTGAACGACATCCTGAGCAGGCTGGAC | |
| | CCCCCCGAGGCCGAGGTGCAGATCGACAGGCTGATCACCGGCAGG | |
| | CTGCAGAGCCTGCAGACCTACGTGACCCAGCAGCTGATCAGGGCCG | |
| | CCGAGATCAGGGCCAGCGCCAACCTGGCCGCCACCAAGATGAGCG | |
| | AGTGCGTGCTGGGCCAGAGCAAGAGGGTGGACTTCTGCGGCAAGG | |
| | GCTACCACCTGATGAGCTTCCCCCAGAGCGCCCCCCACGGCGTGGT | |
| | GTTCCTGCACGTGACCTACGTGCCCGCCCAGGAGAAGAACTTCACC | |
| | ACCGCCCCCGCCATCTGCCACGACGGCAAGGCCCACTTCCCCAGGG | |
| | AGGGCGTGTTCGTGAGCAACGGCACCCACTGGTTCGTGACCCAGAG | |
| | GAACTTCTACGAGCCCCAGATCATCACCACCGACAACACCTTCGTGA | |
| | GCGGCAACTGCGACGTGGTGATCGGCATCGTGAACAACACCGTGTA | |
| | CGACCCCCTGCAGCCCGAGCTGGACAGCTTCAAGGAGGAGCTGGAC | |
| | AAGTACTTCAAGAACCACACCAGCCCCGACGTGGACCTGGGCGACA | |
| | TCAGCGGCATCAACGCCAGCGTGGTGAACATCCAGAAGGAGATCGA | |
| | CAGGCTGAACGAGGTGGCCAAGAACCTGAACGAGAGCCTGATCGAC | |
| | CTGCAGGAGCTGGGCAAGTACGAGCAGTACATCAAGTGGCCCTGGT | |
| | ACATCTGGCTGGGCTTCATCGCCGGCCTGATCGCCATCGTGATGGT | |
| | GACCATCATGCTGTGCTGCATGACCAGCTGCTGCAGCTGCCTGAAG | |
| | GGCTGCTGCAGCTGCGGCAGCTGCTGCAAGTTCGACGAGGACGACA | |
| | GCGAGCCCGTGCTGAAGGGCGTGAAGCTGCACTACACCGGAAGCG | |
| | GAGCCACGAACTTCTCTCTGTTAAAGCAAGCAGGAGATGTTGAAGAA | |
| | AACCCCGGGCCTATGAAGGCAATACTAGTAGTTCTGCTATATACATTT | |
| | GCAACCGCAAATGCAGACACATTATGTATAGGTTATCATGCGAACAA | |
| | CTCAACAGACACTGTAGACACAGTACTAGAAAAGAATGTAACAGTAA | |
| | CACACTCTGTTAACCTTCTAGAAGACAAGCATAACGGGAAACTATGC | |
| | AAACTAAGAGGGGTAGCCCCATTGCATTTGGGTAAATGTAACATTGC | |
| | TGGCTGGATCCTGGGAAATCCAGAGTGTGAATCACTCTCCACAGCAA | |
| | GCTCATGGTCCTACATTGTGGAAACATCTAGTTCAGACAATGGAACG | |
| | TGTTACCCAGGAGATTTCATCGATTATGAGGAGCTAAGAGAGCAATT | |
| | GAGCTCAGTGTCATCATTTGAAAGGTTTGAGATATTCCCCAAGACAA | |
| | GTTCATGGCCCAATCATGACTCGAACAAAGGTGTAACGACAGCATGT | |
| | CCTCATGCTGGAGCAAAAAGCTTCTACAAAAATTTAATATGGCTAGTT | |
| | AAAAAAGGAAATTCATACCCAAAGCTCAGCAAATCCTACATTAATGAT | |
| | AAAGGGAAAGAAGTCCTCGTGCTATGGGGCATTCACCATCCACCTAC | |
| | TAGTGCTGACCAACAAAGTCTCTATCAGAATGCAGATGCATATGTTTT | |
| | TGTGGGGACATCAAGATACAGCAAGAAGTTCAAGCCGGAAATAGCAA | |
| | TAAGGCCCAAAGTGAGGGATCAAGAAGGGAGAATGAACTATTACTGG | |
| | ACACTAGTAGAGCCGGGAGACAAAATAACATTCGAAGCAACTGGAAA | |
| | TCTAGTGGTACCGAGATATGCATTCGCAATGGAAAGAAATGCTGGAT | |
| | CTGGTATTATCATTTCAGATACACCAGTCCACGATTGCAATACAACTT | |
| | GTCAGACACCCAAGGGTGCTATAAACACCAGCCTCCCATTTCAGAAC | |
| | ATACATCCGATCACAATTGGAAAATGTCCAAAATATGTAAAAAGCACA | |
| | AAATTGAGACTGGCCACAGGATTGAGGAATGTCCCGTCCATTCAATC | |
| | TAGAGGCCTATTTGGGGCCATTGCCGGTTTCATTGAAGGGGGGTGG | |
| | ACAGGGATGGTAGATGGATGGTACGGTTATCACCATCAAAATGAGCA | |
| | GGGGTCAGGATATGCAGCCGACCTGAAGAGCACACAGAATGCCATT | |
| | GACGAGATTACTAACAAAGTAAACTCTGTTATTGAAAAAATGAATACA | |
| | CAGTTCACAGCAGTAGGTAAAGAGTTCAACCACCTGGAAAAAAGAAT | |
| | AGAGAATTTAAATAAAAAAGTTGATGATGGTTTCCTGGACATTTGGAC | |
| | TTACAATGCCGAACTGTTGGTTCTATTGGAAAATGAAAGAACTTTGGA | |
| | CTACCACGATTCAAAGGTGAAGAACTTATATGAAAAGGTAAGAAGCC | |
| | AGTTAAAAAACAATGCCAAGGAAATTGGAAACGGCTGCTTTGAATTTT | |
| | ACCACAAATGTGATAACACGTGCATGGAAAGTGTCAAAAATGGGACT | |
| | TATGACTACCCAAAATACTCAGAGGAAGCAAAATTAAACAGAGAAGAA | |
| | ATAGATGGGGTAAAGCTGGAATCAACAAGGATTTACCAGATTTTGGC | |
| | GATCTATTCAACCGTCGCCAGTTCATTGGTACTGGTAGTCTCCCTGG | |
| | GGGCAATCAGTTTCTGGATGTGCTCTAATGGGTCTCTACAGTGTAGA | |
| | ATATGTATTTAAGGAAGCGGAGCCACGAACTTCTCTCTGTTAAAGCAA | |
| | GCAGGAGATGTTGAAGAAAACCCCGGGCCTAGCAAAAGCAGGGGAT | |
| | AATTCTATTAACCATGAAGACTATCATTGCTTTGAGCTACATTCTATGT | |
| | CTGGTTTTCGCTCAAAAACTTCCTGGAAATGACAATAGCACTGCAAC | |
| | GCTGTGCCTTGGGCACCATGCAGTACCAAACGGAACGATAGTGAAAA | |
| | CAATCACGAATGACCAAATTGAAGTTACTAATGCTACTGAGCTGGTTC | |
| | AGAATTCCTCAATAGGTGAAATATGCGACAGTCCTCATCAGATCCTTG | |
| | ATGGAGAAAACTGCACACTAATAGATGCTCTATTGGGAGACCCTCAG | |
| | TGTGATGGCTTTCAAAATAAGAAATGGGACCTTTTTGTTGAACGAAGC | |
| | AAAGCCTACAGCAACTGTTACCCTTATGATGTGCCGGATTATGCCTC | |
| | CCTTAGGTCACTAGTTGCCTCATCCGGCACACTGGAGTTTAACAATG | |
| | AAAGCTTCAATTGGGCTGGAGTCACTCAAAACGGAACAAGTTCTGCT | |
| | TGCATAAGGGGATCTAATAGTAGTTTCTTTAGTAGATTAAATTGGTTG | |
| | ACCCACTTAAACTTCAAGTACCCAGCATTGAACGTGACTATGCCAAAC | |
| | AATGAACAATTTGACAAATTGTACATTTGGGGGGTTCACCACCCGGG | |
| | TACGGACAAGGACCAAATCTTCCTGTATGCTCAATCATCAGGAAGAA | |
| | TCACAGTATCTACCAAAAGAAGCCAACAAGCTGTAATCCCGAATATC | |
| | GGATCTAGACCCAGAATAAGGAATATCCCTAGCAGAATAAGCATCTA | |
| | TTGGACAATAGTAAAACCGGGAGACATACTTTTGATTAACAGCACAG | |
| | GGAATCTAATTGCTCCTAGGGGTTACTTCAAAATACGAAGTGGGAAA | |
| | AGCTCAATAATGAGATCAGATGCACCCATTGGCAAATGCAAGTCTGA | |
| | ATGCATCACTCCAAATGGAAGCATTCCCAATGACAAACCATTCCAAAA | |
| | TGTAAACAGGATCACATACGGGGCCTGTCCCAGATATGTTAAGCAAA | |
| | GCACTCTGAAATTGGCAACAGGAATGCGAAATGTACCAGAGAAACAA | |
| | ACTAGAGGCATATTTGGCGCAATAGCGGGTTTCATAGAAAATGGTTG | |
| | GGAGGGAATGGTGGATGGTTGGTACGGTTTCAGGCATCAAAATTCTG | |
| | AGGGAAGAGGACAAGCAGCAGATCTCAAAAGCACTCAAGCAGCAAT | |
| | CGATCAAATCAATGGGAAGCTGAATCGATTGATCGGGAAAACCAACG | |
| | AGAAATTCCATCAGATTGAGAAAGAATTCTCAGAAGTAGAAGGGAGA | |
| | ATTCAGGACCTTGAGAAATATGTTGAGGACACAAAAATAGATCTCTGG | |
| | TCATACAACGCAGAGCTTCTTGTTGCCCTGGAAAACCAACATACAATT | |
| | GATCTAACTGACTCAGAAATGAACAAACTGTTTGAAAAAACAAAGAAG | |
| | CAACTGAGGGAAAATGCTGAGGATATGGGCAATGGTTGTTTCAAAAT | |
| | ATACCACAAATGTGACAATGCCTGCATAGGATCAATCAGAAATGGAA | |
| | CTTATGACCACGATGTATACAGGGATGAAGCATTAAACAACCGGTTC | |
| | CAGATCAAGGGAGTTGAGCTGAAGTCAGGGTACAAAGATTGGATCCT | |
| | ATGGATTTCCTTTGCCATATCATGTTTTTTGCTTTGTGTTGCTTTGTTG | |
| | GGGTTCATCATGTGGGCCTGCCAAAAGGGCAACATTAGGTGCAACAT | |
| | TTGCATTTGAGTGCATTAATTAAAAACACCCTTGTTTCTACTGGAAGC | |
| | GGAGCCACGAACTTCTCTCTGTTAAAGCAAGCAGGAGATGTTGAAGA | |
| | AAACCCCGGGCCTATTTTCTAATATCCACAAAATGAAGGCAATAATTG | |
| | TACTACTCATGGTAGTAACATCCAATGCAGATCGAATCTGCACTGGG | |
| | ATAACATCGTCAAACTCACCACATGTCGTCAAAACTGCTACTCAAGG | |
| | GGAGGTCAACGTGACCGGTGTAATACCACTGACAACAACACCCACCA | |
| | AATCTCATTTTGCAAATCTCAAAGGAACAGAAACCAGGGGGAAACTAT | |
| | GCCCAAAATGCCTCAACTGCACAGATCTGGATGTAGCCTTGGGCAGA | |
| | CCAAAATGCACAGGGAAAATACCCTCTGCAAGGGTTTCAATACTCCA | |
| | TGAAGTCAGACCTGTTACATCTGGGTGCTTTCCTATAATGCACGATAG | |
| | AACAAAAATTAGACAGCTGCCTAACCTTCTCCGAGGATACGAACATG | |
| | TCAGGTTATCAACTCACAACGTTATCAATGCAAAAGATGCACCAGGAA | |
| | GACCCTACGAAATTGGAACCTCAGGGTCTTGCCCTAACATTACCAAT | |
| | GGAAACGGATTCTTCGCAACAATGGCTTGGGCCGTCCCAAAAAACAA | |
| | AACAGCAACAAATCCATTAACAATAGAAGTACCATACATTTGTACAGA | |
| | AGGAGAAGACCAAATTACCGTTTGGGGGTTCCACTCTGACAACGAGA | |
| | CCCAAATGGCAAAGCTCTATGGGGACTCAAAGCCCCAGAAGTTCACC | |
| | TCATCTGCCAACGGAGTGACCACACATTACGTTTCACAGATTGGTGG | |
| | CTTCCCAAATCAAACAGAAGACGGAGGACTACCACAAAGTGGCAGAA | |
| | TTGTTGTTGATTACATGGTGCAGAAATCTGGAAAAACAGGAACAATTA | |
| | CCTATCAAAGAGGTATTTTATTGCCTCAAAAAGTGTGGTGCGCAAGT | |
| | GGCAGGAGCAAGGTAATAAAAGGATCCTTGCCCTTAATTGGAGAAGC | |
| | AGATTGCCTCCATGAAAAATACGGTGGATTAAACAAAAGCAAGCCTTA | |
| | CTACACAGGGGAACATGCAAAGGCCATAGGAAATTGCCCAATATGGG | |
| | TGAAAACACCCTTGAAGCTGGCCAATGGAACCAAATATAGACCCCCT | |
| | GCAAAACTATTAAAGGAAAGAGGTTTCTTCGGAGCCATTGCTGGTTT | |
| | CTTAGAGGGAGGATGGGAAGGAATGATTGCAGGTTGGCACGGATAC | |
| | ACATCCCATGGGGCACATGGAGTAGCGGTGGCAGCTGACCTTAAGA | |
| | GCACTCAAGAGGCCATAAACAAGATAACAAAAAATCTCAACTCTTTGA | |
| | GTGAGCTGGAAGTAAAGAATCTTCAAAGACTAAGCGGTGCCATGGAT | |
| | GAACTCCACAACGAAATACTAGAACTAGATGAGAAAGTGGATGATCT | |
| | CAGAGCTGACACAATAAGCTCACAAATAGAACTCGCAGTCCTGCTTT | |
| | CCAATGAAGGAATAATAAACAGTGAAGATGAACATCTCTTGGCGCTT | |
| | GAAAGAAAGCTGAAGAAAATGCTGGGCCCCTCTGCTGTAGAGATAG | |
| | GGAATGGATGCTTTGAAACCAAACACAAGTGCAACCAGACCTGCCTC | |
| | GACAGAATAGCTGCTGGTACCTTTGATGCAGGAGAATTTTCTCTCCC | |
| | CACCTTTGATTCACTGAATATTACTGCTGCATCTTTAAATGACGACGG | |
| | ATTGGACAATCATACTATACTGCTTTACTACTCAACTGCTGCCTCCAG | |
| | TTTGGCTGTAACACTGATGATAGCTATCTTTGTTGTTTATATGGTCTC | |
| | CAGAGACAATGTTTCTTGCTCCATTTGTCTATAAGGAAAGTTAAGCCC | |
| | TGTATTTTCCTTTATTGTAGTGCTTGTTTGCTTGTTGTCATTACAAAGA | |
| | AACGTTATTGAAAAATTGATGA | |
| Pan-CoV-Flu | ATGTTCGTGTTCCTGGTGCTGCTGCCCCTGGTGAGCAGCCAGTGCG | 417 |
| Vaccine #29 | TGAACCTGACCACCAGGACCCAGCTGCCCCCCGCCTACACCAACAG | |
| CoV-Wuhan | CTTCACCAGGGGCGTGTACTACCCCGACAAGGTGTTCAGGAGCAGC | |
| Spike(HexaPro)- | GTGCTGCACAGCACCCAGGACCTGTTCCTGCCCTTCTTCAGCAACGT | |
| Influenza (HA) | GACCTGGTTCCACGCCATCCACGTGAGCGGCACCAACGGCACCAAG | |
| | AGGTTCGACAACCCCGTGCTGCCCTTCAACGACGGCGTGTACTTCG | |
| | CCAGCACCGAGAAGAGCAACATCATCAGGGGCTGGATCTTCGGCAC | |
| | CACCCTGGACAGCAAGACCCAGAGCCTGCTGATCGTGAACAACGCC | |
| | ACCAACGTGGTGATCAAGGTGTGCGAGTTCCAGTTCTGCAACGACCC | |
| | CTTCCTGGGCGTGTACTACCACAAGAACAACAAGAGCTGGATGGAGA | |
| | GCGAGTTCAGGGTGTACAGCAGCGCCAACAACTGCACCTTCGAGTA | |
| | CGTGAGCCAGCCCTTCCTGATGGACCTGGAGGGCAAGCAGGGCAAC | |
| | TTCAAGAACCTGAGGGAGTTCGTGTTCAAGAACATCGACGGCTACTT | |
| | CAAGATCTACAGCAAGCACACCCCCATCAACCTGGTGAGGGACCTG | |
| | CCCCAGGGCTTCAGCGCCCTGGAGCCCCTGGTGGACCTGCCCATCG | |
| | GCATCAACATCACCAGGTTCCAGACCCTGCTGGCCCTGCACAGGAG | |
| | CTACCTGACCCCCGGCGACAGCAGCAGCGGCTGGACCGCCGGCGC | |
| | CGCCGCCTACTACGTGGGCTACCTGCAGCCCAGGACCTTCCTGCTG | |
| | AAGTACAACGAGAACGGCACCATCACCGACGCCGTGGACTGCGCCC | |
| | TGGACCCCCTGAGCGAGACCAAGTGCACCCTGAAGAGCTTCACCGT | |
| | GGAGAAGGGCATCTACCAGACCAGCAACTTCAGGGTGCAGCCCACC | |
| | GAGAGCATCGTGAGGTTCCCCAACATCACCAACCTGTGCCCCTTCG | |
| | GCGAGGTGTTCAACGCCACCAGGTTCGCCAGCGTGTACGCCTGGAA | |
| | CAGGAAGAGGATCAGCAACTGCGTGGCCGACTACAGCGTGCTGTAC | |
| | AACAGCGCCAGCTTCAGCACCTTCAAGTGCTACGGCGTGAGCCCCA | |
| | CCAAGCTGAACGACCTGTGCTTCACCAACGTGTACGCCGACAGCTTC | |
| | GTGATCAGGGGCGACGAGGTGAGGCAGATCGCCCCCGGCCAGACC | |
| | GGCAAGATCGCCGACTACAACTACAAGCTGCCCGACGACTTCACCG | |
| | GCTGCGTGATCGCCTGGAACAGCAACAACCTGGACAGCAAGGTGGG | |
| | CGGCAACTACAACTACCTGTACAGGCTGTTCAGGAAGAGCAACCTGA | |
| | AGCCCTTCGAGAGGGACATCAGCACCGAGATCTACCAGGCCGGCAG | |
| | CACCCCCTGCAACGGCGTGGAGGGCTTCAACTGCTACTTCCCCCTG | |
| | CAGAGCTACGGCTTCCAGCCCACCAACGGCGTGGGCTACCAGCCCT | |
| | ACAGGGTGGTGGTGCTGAGCTTCGAGCTGCTGCACGCCCCCGCCAC | |
| | CGTGTGCGGCCCCAAGAAGAGCACCAACCTGGTGAAGAACAAGTGC | |
| | GTGAACTTCAACTTCAACGGCCTGACCGGCACCGGCGTGCTGACCG | |
| | AGAGCAACAAGAAGTTCCTGCCCTTCCAGCAGTTCGGCAGGGACAT | |
| | CGCCGACACCACCGACGCCGTGAGGGACCCCCAGACCCTGGAGAT | |
| | CCTGGACATCACCCCCTGCAGCTTCGGCGGCGTGAGCGTGATCACC | |
| | CCCGGCACCAACACCAGCAACCAGGTGGCCGTGCTGTACCAGGACG | |
| | TGAACTGCACCGAGGTGCCCGTGGCCATCCACGCCGACCAGCTGAC | |
| | CCCCACCTGGAGGGTGTACAGCACCGGCAGCAACGTGTTCCAGACC | |
| | AGGGCCGGCTGCCTGATCGGCGCCGAGCACGTGAACAACAGCTAC | |
| | GAGTGCGACATCCCCATCGGCGCCGGCATCTGCGCCAGCTACCAGA | |
| | CCCAGACCAACAGCCCCGGCAGCGCCAGCAGCGTGGCCAGCCAGA | |
| | GCATCATCGCCTACACCATGAGCCTGGGCGCCGAGAACAGCGTGGC | |
| | CTACAGCAACAACAGCATCGCCATCCCCACCAACTTCACCATCAGCG | |
| | TGACCACCGAGATCCTGCCCGTGAGCATGACCAAGACCAGCGTGGA | |
| | CTGCACCATGTACATCTGCGGCGACAGCACCGAGTGCAGCAACCTG | |
| | CTGCTGCAGTACGGCAGCTTCTGCACCCAGCTGAACAGGGCCCTGA | |
| | CCGGCATCGCCGTGGAGCAGGACAAGAACACCCAGGAGGTGTTCGC | |
| | CCAGGTGAAGCAGATCTACAAGACCCCCCCCATCAAGGACTTCGGC | |
| | GGCTTCAACTTCAGCCAGATCCTGCCCGACCCCAGCAAGCCCAGCA | |
| | AGAGGAGCCCCATCGAGGACCTGCTGTTCAACAAGGTGACCCTGGC | |
| | CGACGCCGGCTTCATCAAGCAGTACGGCGACTGCCTGGGCGACATC | |
| | GCCGCCAGGGACCTGATCTGCGCCCAGAAGTTCAACGGCCTGACCG | |
| | TGCTGCCCCCCCTGCTGACCGACGAGATGATCGCCCAGTACACCAG | |
| | CGCCCTGCTGGCCGGCACCATCACCAGCGGCTGGACCTTCGGCGC | |
| | CGGCCCCGCCCTGCAGATCCCCTTCCCCATGCAGATGGCCTACAGG | |
| | TTCAACGGCATCGGCGTGACCCAGAACGTGCTGTACGAGAACCAGA | |
| | AGCTGATCGCCAACCAGTTCAACAGCGCCATCGGCAAGATCCAGGA | |
| | CAGCCTGAGCAGCACCCCCAGCGCCCTGGGCAAGCTGCAGGACGT | |
| | GGTGAACCAGAACGCCCAGGCCCTGAACACCCTGGTGAAGCAGCTG | |
| | AGCAGCAACTTCGGCGCCATCAGCAGCGTGCTGAACGACATCCTGA | |
| | GCAGGCTGGACCCCCCCGAGGCCGAGGTGCAGATCGACAGGCTGA | |
| | TCACCGGCAGGCTGCAGAGCCTGCAGACCTACGTGACCCAGCAGCT | |
| | GATCAGGGCCGCCGAGATCAGGGCCAGCGCCAACCTGGCCGCCAC | |
| | CAAGATGAGCGAGTGCGTGCTGGGCCAGAGCAAGAGGGTGGACTTC | |
| | TGCGGCAAGGGCTACCACCTGATGAGCTTCCCCCAGAGCGCCCCCC | |
| | ACGGCGTGGTGTTCCTGCACGTGACCTACGTGCCCGCCCAGGAGAA | |
| | GAACTTCACCACCGCCCCCGCCATCTGCCACGACGGCAAGGCCCAC | |
| | TTCCCCAGGGAGGGCGTGTTCGTGAGCAACGGCACCCACTGGTTCG | |
| | TGACCCAGAGGAACTTCTACGAGCCCCAGATCATCACCACCGACAAC | |
| | ACCTTCGTGAGCGGCAACTGCGACGTGGTGATCGGCATCGTGAACA | |
| | ACACCGTGTACGACCCCCTGCAGCCCGAGCTGGACAGCTTCAAGGA | |
| | GGAGCTGGACAAGTACTTCAAGAACCACACCAGCCCCGACGTGGAC | |
| | CTGGGCGACATCAGCGGCATCAACGCCAGCGTGGTGAACATCCAGA | |
| | AGGAGATCGACAGGCTGAACGAGGTGGCCAAGAACCTGAACGAGAG | |
| | CCTGATCGACCTGCAGGAGCTGGGCAAGTACGAGCAGTACATCAAG | |
| | TGGCCCTGGTACATCTGGCTGGGCTTCATCGCCGGCCTGATCGCCA | |
| | TCGTGATGGTGACCATCATGCTGTGCTGCATGACCAGCTGCTGCAGC | |
| | TGCCTGAAGGGCTGCTGCAGCTGCGGCAGCTGCTGCAAGTTCGACG | |
| | AGGACGACAGCGAGCCCGTGCTGAAGGGCGTGAAGCTGCACTACAC | |
| | CGGAAGCGGAGCCACGAACTTCTCTCTGTTAAAGCAAGCAGGAGAT | |
| | GTTGAAGAAAACCCCGGGCCTATGAAGGCAATACTAGTAGTTCTGCT | |
| | ATATACATTTGCAACCGCAAATGCAGACACATTATGTATAGGTTATCA | |
| | TGCGAACAACTCAACAGACACTGTAGACACAGTACTAGAAAAGAATG | |
| | TAACAGTAACACACTCTGTTAACCTTCTAGAAGACAAGCATAACGGGA | |
| | AACTATGCAAACTAAGAGGGGTAGCCCCATTGCATTTGGGTAAATGT | |
| | AACATTGCTGGCTGGATCCTGGGAAATCCAGAGTGTGAATCACTCTC | |
| | CACAGCAAGCTCATGGTCCTACATTGTGGAAACATCTAGTTCAGACA | |
| | ATGGAACGTGTTACCCAGGAGATTTCATCGATTATGAGGAGCTAAGA | |
| | GAGCAATTGAGCTCAGTGTCATCATTTGAAAGGTTTGAGATATTCCCC | |
| | AAGACAAGTTCATGGCCCAATCATGACTCGAACAAAGGTGTAACGAC | |
| | AGCATGTCCTCATGCTGGAGCAAAAAGCTTCTACAAAAATTTAATATG | |
| | GCTAGTTAAAAAAGGAAATTCATACCCAAAGCTCAGCAAATCCTAGAT | |
| | TAATGATAAAGGGAAAGAAGTCCTCGTGCTATGGGGCATTCACCATC | |
| | CACCTACTAGTGCTGACCAACAAAGTCTCTATCAGAATGCAGATGCA | |
| | TATGTTTTTGTGGGGACATCAAGATACAGCAAGAAGTTCAAGCCGGA | |
| | AATAGCAATAAGGCCCAAAGTGAGGGATCAAGAAGGGAGAATGAACT | |
| | ATTACTGGACACTAGTAGAGCCGGGAGACAAAATAACATTCGAAGCA | |
| | ACTGGAAATCTAGTGGTACCGAGATATGCATTCGCAATGGAAAGAAA | |
| | TGCTGGATCTGGTATTATCATTTCAGATACACCAGTCCACGATTGCAA | |
| | TACAACTTGTCAGACACCCAAGGGTGCTATAAACACCAGCCTCCCAT | |
| | TTCAGAACATACATCCGATCACAATTGGAAAATGTCCAAAATATGTAA | |
| | AAAGCACAAAATTGAGACTGGCCACAGGATTGAGGAATGTCCCGTCC | |
| | ATTCAATCTAGAGGCCTATTTGGGGCCATTGCCGGTTTCATTGAAGG | |
| | GGGGTGGACAGGGATGGTAGATGGATGGTACGGTTATCACCATCAA | |
| | AATGAGCAGGGGTCAGGATATGCAGCCGACCTGAAGAGCACACAGA | |
| | ATGCCATTGACGAGATTACTAACAAAGTAAACTCTGTTATTGAAAAAA | |
| | TGAATACACAGTTCACAGCAGTAGGTAAAGAGTTCAACCACCTGGAA | |
| | AAAAGAATAGAGAATTTAAATAAAAAAGTTGATGATGGTTTCCTGGAC | |
| | ATTTGGACTTACAATGCCGAACTGTTGGTTCTATTGGAAAATGAAAGA | |
| | ACTTTGGACTACCACGATTCAAAGGTGAAGAACTTATATGAAAAGGTA | |
| | AGAAGCCAGTTAAAAAACAATGCCAAGGAAATTGGAAACGGCTGCTT | |
| | TGAATTTTACCACAAATGTGATAACACGTGCATGGAAAGTGTCAAAAA | |
| | TGGGACTTATGACTACCCAAAATACTCAGAGGAAGCAAAATTAAACA | |
| | GAGAAGAAATAGATGGGGTAAAGCTGGAATCAACAAGGATTTACCAG | |
| | ATTTTGGCGATCTATTCAACCGTCGCCAGTTCATTGGTACTGGTAGTC | |
| | TCCCTGGGGGCAATCAGTTTCTGGATGTGCTCTAATGGGTCTCTACA | |
| | GTGTAGAATATGTATTTAAGGAAGCGGAGCCACGAACTTCTCTCTGTT | |
| | AAAGCAAGCAGGAGATGTTGAAGAAAACCCCGGGCCTAGCAAAAGC | |
| | AGGGGATAATTCTATTAACCATGAAGACTATCATTGCTTTGAGCTACA | |
| | TTCTATGTCTGGTTTTCGCTCAAAAACTTCCTGGAAATGACAATAGCA | |
| | CTGCAACGCTGTGCCTTGGGCACCATGCAGTACCAAACGGAACGAT | |
| | AGTGAAAACAATCACGAATGACCAAATTGAAGTTACTAATGCTACTGA | |
| | GCTGGTTCAGAATTCCTCAATAGGTGAAATATGCGACAGTCCTCATC | |
| | AGATCCTTGATGGAGAAAACTGCACACTAATAGATGCTCTATTGGGA | |
| | GACCCTCAGTGTGATGGCTTTCAAAATAAGAAATGGGACCTTTTTGTT | |
| | GAACGAAGCAAAGCCTACAGCAACTGTTACCCTTATGATGTGCCGGA | |
| | TTATGCCTCCCTTAGGTCACTAGTTGCCTCATCCGGCACACTGGAGT | |
| | TTAACAATGAAAGCTTCAATTGGGCTGGAGTCACTCAAAACGGAACA | |
| | AGTTCTGCTTGCATAAGGGGATCTAATAGTAGTTTCTTTAGTAGATTA | |
| | AATTGGTTGACCCACTTAAACTTCAAGTACCCAGCATTGAACGTGACT | |
| | ATGCCAAACAATGAACAATTTGACAAATTGTACATTTGGGGGGTTCAC | |
| | CACCCGGGTACGGACAAGGACCAAATCTTCCTGTATGCTCAATCATC | |
| | AGGAAGAATCACAGTATCTACCAAAAGAAGCCAACAAGCTGTAATCC | |
| | CGAATATCGGATCTAGACCCAGAATAAGGAATATCCCTAGCAGAATA | |
| | AGCATCTATTGGACAATAGTAAAACCGGGAGACATACTTTTGATTAAC | |
| | AGCACAGGGAATCTAATTGCTCCTAGGGGTTACTTCAAAATACGAAG | |
| | TGGGAAAAGCTCAATAATGAGATCAGATGCACCCATTGGCAAATGCA | |
| | AGTCTGAATGCATCACTCCAAATGGAAGCATTCCCAATGACAAACCAT | |
| | TCCAAAATGTAAACAGGATCACATACGGGGCCTGTCCCAGATATGTT | |
| | AAGCAAAGCACTCTGAAATTGGCAACAGGAATGCGAAATGTACCAGA | |
| | GAAACAAACTAGAGGCATATTTGGCGCAATAGCGGGTTTCATAGAAA | |
| | ATGGTTGGGAGGGAATGGTGGATGGTTGGTACGGTTTCAGGCATCA | |
| | AAATTCTGAGGGAAGAGGACAAGCAGCAGATCTCAAAAGCACTCAAG | |
| | CAGCAATCGATCAAATCAATGGGAAGCTGAATCGATTGATCGGGAAA | |
| | ACCAACGAGAAATTCCATCAGATTGAGAAAGAATTCTCAGAAGTAGAA | |
| | GGGAGAATTCAGGACCTTGAGAAATATGTTGAGGACACAAAAATAGA | |
| | TCTCTGGTCATACAACGCAGAGCTTCTTGTTGCCCTGGAAAACCAAC | |
| | ATACAATTGATCTAACTGACTCAGAAATGAACAAACTGTTTGAAAAAA | |
| | CAAAGAAGCAACTGAGGGAAAATGCTGAGGATATGGGCAATGGTTGT | |
| | TTCAAAATATACCACAAATGTGACAATGCCTGCATAGGATCAATCAGA | |
| | AATGGAACTTATGACCACGATGTATACAGGGATGAAGCATTAAACAA | |
| | CCGGTTCCAGATCAAGGGAGTTGAGCTGAAGTCAGGGTACAAAGATT | |
| | GGATCCTATGGATTTCCTTTGCCATATCATGTTTTTTGCTTTGTGTTGC | |
| | TTTGTTGGGGTTCATCATGTGGGCCTGCCAAAAGGGCAACATTAGGT | |
| | GCAACATTTGCATTTGAGTGCATTAATTAAAAACACCCTTGTTTCTACT | |
| | GGAAGCGGAGCCACGAACTTCTCTCTGTTAAAGCAAGCAGGAGATGT | |
| | TGAAGAAAACCCCGGGCCTATTTTCTAATATCCACAAAATGAAGGCAA | |
| | TAATTGTACTACTCATGGTAGTAACATCCAATGCAGATCGAATCTGCA | |
| | CTGGGATAACATCGTCAAACTCACCACATGTCGTCAAAACTGCTACT | |
| | CAAGGGGAGGTCAACGTGACCGGTGTAATACCACTGACAACAACAC | |
| | CCACCAAATCTCATTTTGCAAATCTCAAAGGAACAGAAACCAGGGGG | |
| | AAACTATGCCCAAAATGCCTCAACTGCACAGATCTGGATGTAGCCTT | |
| | GGGCAGACCAAAATGCACAGGGAAAATACCCTCTGCAAGGGTTTCAA | |
| | TACTCCATGAAGTCAGACCTGTTACATCTGGGTGCTTTCCTATAATGC | |
| | ACGATAGAACAAAAATTAGACAGCTGCCTAACCTTCTCCGAGGATAC | |
| | GAACATGTCAGGTTATCAACTCACAACGTTATCAATGCAAAAGATGCA | |
| | CCAGGAAGACCCTACGAAATTGGAACCTCAGGGTCTTGCCCTAACAT | |
| | TACCAATGGAAACGGATTCTTCGCAACAATGGCTTGGGCCGTCCCAA | |
| | AAAACAAAACAGCAACAAATCCATTAACAATAGAAGTACCATACATTT | |
| | GTACAGAAGGAGAAGACCAAATTACCGTTTGGGGGTTCCACTCTGAC | |
| | AACGAGACCCAAATGGCAAAGCTCTATGGGGACTCAAAGCCCCAGA | |
| | AGTTCACCTCATCTGCCAACGGAGTGACCACACATTACGTTTCACAG | |
| | ATTGGTGGCTTCCCAAATCAAACAGAAGACGGAGGACTACCACAAAG | |
| | TGGCAGAATTGTTGTTGATTACATGGTGCAGAAATCTGGAAAAACAG | |
| | GAACAATTACCTATCAAAGAGGTATTTTATTGCCTCAAAAAGTGTGGT | |
| | GCGCAAGTGGCAGGAGCAAGGTAATAAAAGGATCCTTGCCCTTAATT | |
| | GGAGAAGCAGATTGCCTCCATGAAAAATACGGTGGATTAAACAAAAG | |
| | CAAGCCTTACTACACAGGGGAACATGCAAAGGCCATAGGAAATTGCC | |
| | CAATATGGGTGAAAACACCCTTGAAGCTGGCCAATGGAACCAAATAT | |
| | AGACCCCCTGCAAAACTATTAAAGGAAAGAGGTTTCTTCGGAGCCAT | |
| | TGCTGGTTTCTTAGAGGGAGGATGGGAAGGAATGATTGCAGGTTGG | |
| | CACGGATACACATCCCATGGGGCACATGGAGTAGCGGTGGCAGCTG | |
| | ACCTTAAGAGCACTCAAGAGGCCATAAACAAGATAACAAAAAATCTCA | |
| | ACTCTTTGAGTGAGCTGGAAGTAAAGAATCTTCAAAGACTAAGCGGT | |
| | GCCATGGATGAACTCCACAACGAAATACTAGAACTAGATGAGAAAGT | |
| | GGATGATCTCAGAGCTGACACAATAAGCTCACAAATAGAACTCGCAG | |
| | TCCTGCTTTCCAATGAAGGAATAATAAACAGTGAAGATGAACATCTCT | |
| | TGGCGCTTGAAAGAAAGCTGAAGAAAATGCTGGGCCCCTCTGCTGTA | |
| | GAGATAGGGAATGGATGCTTTGAAACCAAACACAAGTGCAACCAGAC | |
| | CTGCCTCGACAGAATAGCTGCTGGTACCTTTGATGCAGGAGAATTTT | |
| | CTCTCCCCACCTTTGATTCACTGAATATTACTGCTGCATCTTTAAATG | |
| | ACGACGGATTGGACAATCATACTATACTGCTTTACTACTCAACTGCTG | |
| | CCTCCAGTTTGGCTGTAACACTGATGATAGCTATCTTTGTTGTTTATA | |
| | TGGTCTCCAGAGACAATGTTTCTTGCTCCATTTGTCTATAAGGAAAGT | |
| | TAAGCCCTGTATTTTCCTTTATTGTAGTGCTTGTTTGCTTGTTGTCATT | |
| | ACAAAGAAACGTTATTGAAAAATTGATGA | |
| Pan-CoV-Flu | ATGTTCGTGTTCCTGGTGCTGCTGCCCCTGGTGAGCAGCCAGTGCG | 418 |
| Vaccine #30 | TGAACCTGACCACCAGGACCCAGCTGCCCCCCGCCTACACCAACAG | |
| CoV-Wuhan | CTTCACCAGGGGCGTGTACTACCCCGACAAGGTGTTCAGGAGCAGC | |
| Spike(2 proline | GTGCTGCACAGCACCCAGGACCTGTTCCTGCCCTTCTTCAGCAACGT | |
| substitution)- | GACCTGGTTCCACGCCATCCACGTGAGCGGCACCAACGGCACCAAG | |
| Influenza (HA) | AGGTTCGACAACCCCGTGCTGCCCTTCAACGACGGCGTGTACTTCG | |
| | CCAGCACCGAGAAGAGCAACATCATCAGGGGCTGGATCTTCGGCAC | |
| | CACCCTGGACAGCAAGACCCAGAGCCTGCTGATCGTGAACAACGCC | |
| | ACCAACGTGGTGATCAAGGTGTGCGAGTTCCAGTTCTGCAACGACCC | |
| | CTTCCTGGGCGTGTACTACCACAAGAACAACAAGAGCTGGATGGAGA | |
| | GCGAGTTCAGGGTGTACAGCAGCGCCAACAACTGCACCTTCGAGTA | |
| | CGTGAGCCAGCCCTTCCTGATGGACCTGGAGGGCAAGCAGGGCAAC | |
| | TTCAAGAACCTGAGGGAGTTCGTGTTCAAGAACATCGACGGCTACTT | |
| | CAAGATCTACAGCAAGCACACCCCCATCAACCTGGTGAGGGACCTG | |
| | CCCCAGGGCTTCAGCGCCCTGGAGCCCCTGGTGGACCTGCCCATCG | |
| | GCATCAACATCACCAGGTTCCAGACCCTGCTGGCCCTGCACAGGAG | |
| | CTACCTGACCCCCGGCGACAGCAGCAGCGGCTGGACCGCCGGCGC | |
| | CGCCGCCTACTACGTGGGCTACCTGCAGCCCAGGACCTTCCTGCTG | |
| | AAGTACAACGAGAACGGCACCATCACCGACGCCGTGGACTGCGCCC | |
| | TGGACCCCCTGAGCGAGACCAAGTGCACCCTGAAGAGCTTCACCGT | |
| | GGAGAAGGGCATCTACCAGACCAGCAACTTCAGGGTGCAGCCCACC | |
| | GAGAGCATCGTGAGGTTCCCCAACATCACCAACCTGTGCCCCTTCG | |
| | GCGAGGTGTTCAACGCCACCAGGTTCGCCAGCGTGTACGCCTGGAA | |
| | CAGGAAGAGGATCAGCAACTGCGTGGCCGACTACAGCGTGCTGTAC | |
| | AACAGCGCCAGCTTCAGCACCTTCAAGTGCTACGGCGTGAGCCCCA | |
| | CCAAGCTGAACGACCTGTGCTTCACCAACGTGTACGCCGACAGCTTC | |
| | GTGATCAGGGGCGACGAGGTGAGGCAGATCGCCCCCGGCCAGACC | |
| | GGCAAGATCGCCGACTACAACTACAAGCTGCCCGACGACTTCACCG | |
| | GCTGCGTGATCGCCTGGAACAGCAACAACCTGGACAGCAAGGTGGG | |
| | CGGCAACTACAACTACCTGTACAGGCTGTTCAGGAAGAGCAACCTGA | |
| | AGCCCTTCGAGAGGGACATCAGCACCGAGATCTACCAGGCCGGCAG | |
| | CACCCCCTGCAACGGCGTGGAGGGCTTCAACTGCTACTTCCCCCTG | |
| | CAGAGCTACGGCTTCCAGCCCACCAACGGCGTGGGCTACCAGCCCT | |
| | ACAGGGTGGTGGTGCTGAGCTTCGAGCTGCTGCACGCCCCCGCCAC | |
| | CGTGTGCGGCCCCAAGAAGAGCACCAACCTGGTGAAGAACAAGTGC | |
| | GTGAACTTCAACTTCAACGGCCTGACCGGCACCGGCGTGCTGACCG | |
| | AGAGCAACAAGAAGTTCCTGCCCTTCCAGCAGTTCGGCAGGGACAT | |
| | CGCCGACACCACCGACGCCGTGAGGGACCCCCAGACCCTGGAGAT | |
| | CCTGGACATCACCCCCTGCAGCTTCGGCGGCGTGAGCGTGATCACC | |
| | CCCGGCACCAACACCAGCAACCAGGTGGCCGTGCTGTACCAGGACG | |
| | TGAACTGCACCGAGGTGCCCGTGGCCATCCACGCCGACCAGCTGAC | |
| | CCCCACCTGGAGGGTGTACAGCACCGGCAGCAACGTGTTCCAGACC | |
| | AGGGCCGGCTGCCTGATCGGCGCCGAGCACGTGAACAACAGCTAC | |
| | GAGTGCGACATCCCCATCGGCGCCGGCATCTGCGCCAGCTACCAGA | |
| | CCCAGACCAACAGCCCCAGGAGGGCCAGGAGCGTGGCCAGCCAGA | |
| | GCATCATCGCCTACACCATGAGCCTGGGCGCCGAGAACAGCGTGGC | |
| | CTACAGCAACAACAGCATCGCCATCCCCACCAACTTCACCATCAGCG | |
| | TGACCACCGAGATCCTGCCCGTGAGCATGACCAAGACCAGCGTGGA | |
| | CTGCACCATGTACATCTGCGGCGACAGCACCGAGTGCAGCAACCTG | |
| | CTGCTGCAGTACGGCAGCTTCTGCACCCAGCTGAACAGGGCCCTGA | |
| | CCGGCATCGCCGTGGAGCAGGACAAGAACACCCAGGAGGTGTTCGC | |
| | CCAGGTGAAGCAGATCTACAAGACCCCCCCCATCAAGGACTTCGGC | |
| | GGCTTCAACTTCAGCCAGATCCTGCCCGACCCCAGCAAGCCCAGCA | |
| | AGAGGAGCTTCATCGAGGACCTGCTGTTCAACAAGGTGACCCTGGC | |
| | CGACGCCGGCTTCATCAAGCAGTACGGCGACTGCCTGGGCGACATC | |
| | GCCGCCAGGGACCTGATCTGCGCCCAGAAGTTCAACGGCCTGACCG | |
| | TGCTGCCCCCCCTGCTGACCGACGAGATGATCGCCCAGTACACCAG | |
| | CGCCCTGCTGGCCGGCACCATCACCAGCGGCTGGACCTTCGGCGC | |
| | CGGCGCCGCCCTGCAGATCCCCTTCGCCATGCAGATGGCCTACAGG | |
| | TTCAACGGCATCGGCGTGACCCAGAACGTGCTGTACGAGAACCAGA | |
| | AGCTGATCGCCAACCAGTTCAACAGCGCCATCGGCAAGATCCAGGA | |
| | CAGCCTGAGCAGCACCGCCAGCGCCCTGGGCAAGCTGCAGGACGT | |
| | GGTGAACCAGAACGCCCAGGCCCTGAACACCCTGGTGAAGCAGCTG | |
| | AGCAGCAACTTCGGCGCCATCAGCAGCGTGCTGAACGACATCCTGA | |
| | GCAGGCTGGACCCCCCCGAGGCCGAGGTGCAGATCGACAGGCTGA | |
| | TCACCGGCAGGCTGCAGAGCCTGCAGACCTACGTGACCCAGCAGCT | |
| | GATCAGGGCCGCCGAGATCAGGGCCAGCGCCAACCTGGCCGCCAC | |
| | CAAGATGAGCGAGTGCGTGCTGGGCCAGAGCAAGAGGGTGGACTTC | |
| | TGCGGCAAGGGCTACCACCTGATGAGCTTCCCCCAGAGCGCCCCCC | |
| | ACGGCGTGGTGTTCCTGCACGTGACCTACGTGCCCGCCCAGGAGAA | |
| | GAACTTCACCACCGCCCCCGCCATCTGCCACGACGGCAAGGCCCAC | |
| | TTCCCCAGGGAGGGCGTGTTCGTGAGCAACGGCACCCACTGGTTCG | |
| | TGACCCAGAGGAACTTCTACGAGCCCCAGATCATCACCACCGACAAC | |
| | ACCTTCGTGAGCGGCAACTGCGACGTGGTGATCGGCATCGTGAACA | |
| | ACACCGTGTACGACCCCCTGCAGCCCGAGCTGGACAGCTTCAAGGA | |
| | GGAGCTGGACAAGTACTTCAAGAACCACACCAGCCCCGACGTGGAC | |
| | CTGGGCGACATCAGCGGCATCAACGCCAGCGTGGTGAACATCCAGA | |
| | AGGAGATCGACAGGCTGAACGAGGTGGCCAAGAACCTGAACGAGAG | |
| | CCTGATCGACCTGCAGGAGCTGGGCAAGTACGAGCAGTACATCAAG | |
| | TGGCCCTGGTACATCTGGCTGGGCTTCATCGCCGGCCTGATCGCCA | |
| | TCGTGATGGTGACCATCATGCTGTGCTGCATGACCAGCTGCTGCAGC | |
| | TGCCTGAAGGGCTGCTGCAGCTGCGGCAGCTGCTGCAAGTTCGACG | |
| | AGGACGACAGCGAGCCCGTGCTGAAGGGCGTGAAGCTGCACTACAC | |
| | CGGAAGCGGAGCCACGAACTTCTCTCTGTTAAAGCAAGCAGGAGAT | |
| | GTTGAAGAAAACCCCGGGCCTATGAAGGCAATACTAGTAGTTCTGCT | |
| | ATATACATTTGCAACCGCAAATGCAGACACATTATGTATAGGTTATCA | |
| | TGCGAACAACTCAACAGACACTGTAGACACAGTACTAGAAAAGAATG | |
| | TAACAGTAACACACTCTGTTAACCTTCTAGAAGACAAGCATAACGGGA | |
| | AACTATGCAAACTAAGAGGGGTAGCCCCATTGCATTTGGGTAAATGT | |
| | AACATTGCTGGCTGGATCCTGGGAAATCCAGAGTGTGAATCACTCTC | |
| | CACAGCAAGCTCATGGTCCTACATTGTGGAAACATCTAGTTCAGACA | |
| | ATGGAACGTGTTACCCAGGAGATTTCATCGATTATGAGGAGCTAAGA | |
| | GAGCAATTGAGCTCAGTGTCATCATTTGAAAGGTTTGAGATATTCCCC | |
| | AAGACAAGTTCATGGCCCAATCATGACTCGAACAAAGGTGTAACGAC | |
| | AGCATGTCCTCATGCTGGAGCAAAAAGCTTCTACAAAAATTTAATATG | |
| | GCTAGTTAAAAAAGGAAATTCATACCCAAAGCTCAGCAAATCCTACAT | |
| | TAATGATAAAGGGAAAGAAGTCCTCGTGCTATGGGGCATTCACCATC | |
| | CACCTACTAGTGCTGACCAACAAAGTCTCTATCAGAATGCAGATGCA | |
| | TATGTTTTTGTGGGGACATCAAGATACAGCAAGAAGTTCAAGCCGGA | |
| | AATAGCAATAAGGCCCAAAGTGAGGGATCAAGAAGGGAGAATGAACT | |
| | ATTACTGGACACTAGTAGAGCCGGGAGACAAAATAACATTCGAAGCA | |
| | ACTGGAAATCTAGTGGTACCGAGATATGCATTCGCAATGGAAAGAAA | |
| | TGCTGGATCTGGTATTATCATTTCAGATACACCAGTCCACGATTGCAA | |
| | TACAACTTGTCAGACACCCAAGGGTGCTATAAACACCAGCCTCCCAT | |
| | TTCAGAACATACATCCGATCACAATTGGAAAATGTCCAAAATATGTAA | |
| | AAAGCACAAAATTGAGACTGGCCACAGGATTGAGGAATGTCCCGTCC | |
| | ATTCAATCTAGAGGCCTATTTGGGGCCATTGCCGGTTTCATTGAAGG | |
| | GGGGTGGACAGGGATGGTAGATGGATGGTACGGTTATCACCATCAA | |
| | AATGAGCAGGGGTCAGGATATGCAGCCGACCTGAAGAGCACACAGA | |
| | ATGCCATTGACGAGATTACTAACAAAGTAAACTCTGTTATTGAAAAAA | |
| | TGAATACACAGTTCACAGCAGTAGGTAAAGAGTTCAACCACCTGGAA | |
| | AAAAGAATAGAGAATTTAAATAAAAAAGTTGATGATGGTTTCCTGGAC | |
| | ATTTGGACTTACAATGCCGAACTGTTGGTTCTATTGGAAAATGAAAGA | |
| | ACTTTGGACTACCACGATTCAAAGGTGAAGAACTTATATGAAAAGGTA | |
| | AGAAGCCAGTTAAAAAACAATGCCAAGGAAATTGGAAACGGCTGCTT | |
| | TGAATTTTACCACAAATGTGATAACACGTGCATGGAAAGTGTCAAAAA | |
| | TGGGACTTATGACTACCCAAAATACTCAGAGGAAGCAAAATTAAACA | |
| | GAGAAGAAATAGATGGGGTAAAGCTGGAATCAACAAGGATTTACCAG | |
| | ATTTTGGCGATCTATTCAACCGTCGCCAGTTCATTGGTACTGGTAGTC | |
| | TCCCTGGGGGCAATCAGTTTCTGGATGTGCTCTAATGGGTCTCTACA | |
| | GTGTAGAATATGTATTTAAGGAAGCGGAGCCACGAACTTCTCTCTGTT | |
| | AAAGCAAGCAGGAGATGTTGAAGAAAACCCCGGGCCTAGCAAAAGC | |
| | AGGGGATAATTCTATTAACCATGAAGACTATCATTGCTTTGAGCTACA | |
| | TTCTATGTCTGGTTTTCGCTCAAAAACTTCCTGGAAATGACAATAGCA | |
| | CTGCAACGCTGTGCCTTGGGCACCATGCAGTACCAAACGGAACGAT | |
| | AGTGAAAACAATCACGAATGACCAAATTGAAGTTACTAATGCTACTGA | |
| | GCTGGTTCAGAATTCCTCAATAGGTGAAATATGCGACAGTCCTCATC | |
| | AGATCCTTGATGGAGAAAACTGCACACTAATAGATGCTCTATTGGGA | |
| | GACCCTCAGTGTGATGGCTTTCAAAATAAGAAATGGGACCTTTTTGTT | |
| | GAACGAAGCAAAGCCTACAGCAACTGTTACCCTTATGATGTGCCGGA | |
| | TTATGCCTCCCTTAGGTCACTAGTTGCCTCATCCGGCACACTGGAGT | |
| | TTAACAATGAAAGCTTCAATTGGGCTGGAGTCACTCAAAACGGAACA | |
| | AGTTCTGCTTGCATAAGGGGATCTAATAGTAGTTTCTTTAGTAGATTA | |
| | AATTGGTTGACCCACTTAAACTTCAAGTACCCAGCATTGAACGTGACT | |
| | ATGCCAAACAATGAACAATTTGACAAATTGTACATTTGGGGGGTTCAC | |
| | CACCCGGGTACGGACAAGGACCAAATCTTCCTGTATGCTCAATCATC | |
| | AGGAAGAATCACAGTATCTACCAAAAGAAGCCAACAAGCTGTAATCC | |
| | CGAATATCGGATCTAGACCCAGAATAAGGAATATCCCTAGCAGAATA | |
| | AGCATCTATTGGACAATAGTAAAACCGGGAGACATACTTTTGATTAAC | |
| | AGCACAGGGAATCTAATTGCTCCTAGGGGTTACTTCAAAATACGAAG | |
| | TGGGAAAAGCTCAATAATGAGATCAGATGCACCCATTGGCAAATGCA | |
| | AGTCTGAATGCATCACTCCAAATGGAAGCATTCCCAATGACAAACCAT | |
| | TCCAAAATGTAAACAGGATCACATACGGGGCCTGTCCCAGATATGTT | |
| | AAGCAAAGCACTCTGAAATTGGCAACAGGAATGCGAAATGTACCAGA | |
| | GAAACAAACTAGAGGCATATTTGGCGCAATAGCGGGTTTCATAGAAA | |
| | ATGGTTGGGAGGGAATGGTGGATGGTTGGTACGGTTTCAGGCATCA | |
| | AAATTCTGAGGGAAGAGGACAAGCAGCAGATCTCAAAAGCACTCAAG | |
| | CAGCAATCGATCAAATCAATGGGAAGCTGAATCGATTGATCGGGAAA | |
| | ACCAACGAGAAATTCCATCAGATTGAGAAAGAATTCTCAGAAGTAGAA | |
| | GGGAGAATTCAGGACCTTGAGAAATATGTTGAGGACACAAAAATAGA | |
| | TCTCTGGTCATACAACGCAGAGCTTCTTGTTGCCCTGGAAAACCAAC | |
| | ATACAATTGATCTAACTGACTCAGAAATGAACAAACTGTTTGAAAAAA | |
| | CAAAGAAGCAACTGAGGGAAAATGCTGAGGATATGGGCAATGGTTGT | |
| | TTCAAAATATACCACAAATGTGACAATGCCTGCATAGGATCAATCAGA | |
| | AATGGAACTTATGACCACGATGTATACAGGGATGAAGCATTAAACAA | |
| | CCGGTTCCAGATCAAGGGAGTTGAGCTGAAGTCAGGGTACAAAGATT | |
| | GGATCCTATGGATTTCCTTTGCCATATCATGTTTTTTGCTTTGTGTTGC | |
| | TTTGTTGGGGTTCATCATGTGGGCCTGCCAAAAGGGCAACATTAGGT | |
| | GCAACATTTGCATTTGAGTGCATTAATTAAAAACACCCTTGTTTCTACT | |
| | GGAAGCGGAGCCACGAACTTCTCTCTGTTAAAGCAAGCAGGAGATGT | |
| | TGAAGAAAACCCCGGGCCTATTTTCTAATATCCACAAAATGAAGGCAA | |
| | TAATTGTACTACTCATGGTAGTAACATCCAATGCAGATCGAATCTGCA | |
| | CTGGGATAACATCGTCAAACTCACCACATGTCGTCAAAACTGCTACT | |
| | CAAGGGGAGGTCAACGTGACCGGTGTAATACCACTGACAACAACAC | |
| | CCACCAAATCTCATTTTGCAAATCTCAAAGGAACAGAAACCAGGGGG | |
| | AAACTATGCCCAAAATGCCTCAACTGCACAGATCTGGATGTAGCCTT | |
| | GGGCAGACCAAAATGCACAGGGAAAATACCCTCTGCAAGGGTTTCAA | |
| | TACTCCATGAAGTCAGACCTGTTACATCTGGGTGCTTTCCTATAATGC | |
| | ACGATAGAACAAAAATTAGACAGCTGCCTAACCTTCTCCGAGGATAC | |
| | GAACATGTCAGGTTATCAACTCACAACGTTATCAATGCAAAAGATGCA | |
| | CCAGGAAGACCCTACGAAATTGGAACCTCAGGGTCTTGCCCTAACAT | |
| | TACCAATGGAAACGGATTCTTCGCAACAATGGCTTGGGCCGTCCCAA | |
| | AAAACAAAACAGCAACAAATCCATTAACAATAGAAGTACCATACATTT | |
| | GTACAGAAGGAGAAGACCAAATTACCGTTTGGGGGTTCCACTCTGAC | |
| | AACGAGACCCAAATGGCAAAGCTCTATGGGGACTCAAAGCCCCAGA | |
| | AGTTCACCTCATCTGCCAACGGAGTGACCACACATTACGTTTCACAG | |
| | ATTGGTGGCTTCCCAAATCAAACAGAAGACGGAGGACTACCACAAAG | |
| | TGGCAGAATTGTTGTTGATTACATGGTGCAGAAATCTGGAAAAACAG | |
| | GAACAATTACCTATCAAAGAGGTATTTTATTGCCTCAAAAAGTGTGGT | |
| | GCGCAAGTGGCAGGAGCAAGGTAATAAAAGGATCCTTGCCCTTAATT | |
| | GGAGAAGCAGATTGCCTCCATGAAAAATACGGTGGATTAAACAAAAG | |
| | CAAGCCTTACTACACAGGGGAACATGCAAAGGCCATAGGAAATTGCC | |
| | CAATATGGGTGAAAACACCCTTGAAGCTGGCCAATGGAACCAAATAT | |
| | AGACCCCCTGCAAAACTATTAAAGGAAAGAGGTTTCTTCGGAGCCAT | |
| | TGCTGGTTTCTTAGAGGGAGGATGGGAAGGAATGATTGCAGGTTGG | |
| | CACGGATACACATCCCATGGGGCACATGGAGTAGCGGTGGCAGCTG | |
| | ACCTTAAGAGCACTCAAGAGGCCATAAACAAGATAACAAAAAATCTCA | |
| | ACTCTTTGAGTGAGCTGGAAGTAAAGAATCTTCAAAGACTAAGCGGT | |
| | GCCATGGATGAACTCCACAACGAAATACTAGAACTAGATGAGAAAGT | |
| | GGATGATCTCAGAGCTGACACAATAAGCTCACAAATAGAACTCGCAG | |
| | TCCTGCTTTCCAATGAAGGAATAATAAACAGTGAAGATGAACATCTCT | |
| | TGGCGCTTGAAAGAAAGCTGAAGAAAATGCTGGGCCCCTCTGCTGTA | |
| | GAGATAGGGAATGGATGCTTTGAAACCAAACACAAGTGCAACCAGAC | |
| | CTGCCTCGACAGAATAGCTGCTGGTACCTTTGATGCAGGAGAATTTT | |
| | CTCTCCCCACCTTTGATTCACTGAATATTACTGCTGCATCTTTAAATG | |
| | ACGACGGATTGGACAATCATACTATACTGCTTTACTACTCAACTGCTG | |
| | CCTCCAGTTTGGCTGTAACACTGATGATAGCTATCTTTGTTGTTTATA | |
| | TGGTCTCCAGAGACAATGTTTCTTGCTCCATTTGTCTATAAGGAAAGT | |
| | TAAGCCCTGTATTTTCCTTTATTGTAGTGCTTGTTTGCTTGTTGTCATT | |
| | ACAAAGAAACGTTATTGAAAAATTGATGA | |
| Pan-CoV-Flu | ATGATGAAGGCAATACTAGTAGTTCTGCTATATACATTTGCAACCGCA | 419 |
| Vaccine #31 | AATGCAGACACATTATGTATAGGTTATCATGCGAACAACTCAACAGAC | |
| (H1N1) | ACTGTAGACACAGTACTAGAAAAGAATGTAACAGTAACACACTCTGTT | |
| | AACCTTCTAGAAGACAAGCATAACGGGAAACTATGCAAACTAAGAGG | |
| | GGTAGCCCCATTGCATTTGGGTAAATGTAACATTGCTGGCTGGATCC | |
| | TGGGAAATCCAGAGTGTGAATCACTCTCCACAGCAAGCTCATGGTCC | |
| | TACATTGTGGAAACATCTAGTTCAGACAATGGAACGTGTTACCCAGG | |
| | AGATTTCATCGATTATGAGGAGCTAAGAGAGCAATTGAGCTCAGTGT | |
| | CATCATTTGAAAGGTTTGAGATATTCCCCAAGACAAGTTCATGGCCCA | |
| | ATCATGACTCGAACAAAGGTGTAACGACAGCATGTCCTCATGCTGGA | |
| | GCAAAAAGCTTCTACAAAAATTTAATATGGCTAGTTAAAAAAGGAAAT | |
| | TCATACCCAAAGCTCAGCAAATCCTACATTAATGATAAAGGGAAAGAA | |
| | GTCCTCGTGCTATGGGGCATTCACCATCCACCTACTAGTGCTGACCA | |
| | ACAAAGTCTCTATCAGAATGCAGATGCATATGTTTTTGTGGGGACATC | |
| | AAGATACAGCAAGAAGTTCAAGCCGGAAATAGCAATAAGGCCCAAAG | |
| | TGAGGGATCAAGAAGGGAGAATGAACTATTACTGGACACTAGTAGAG | |
| | CCGGGAGACAAAATAACATTCGAAGCAACTGGAAATCTAGTGGTACC | |
| | GAGATATGCATTCGCAATGGAAAGAAATGCTGGATCTGGTATTATCAT | |
| | TTCAGATACACCAGTCCACGATTGCAATACAACTTGTCAGACACCCAA | |
| | GGGTGCTATAAACACCAGCCTCCCATTTCAGAACATACATCCGATCA | |
| | CAATTGGAAAATGTCCAAAATATGTAAAAAGCACAAAATTGAGACTGG | |
| | CCACAGGATTGAGGAATGTCCCGTCCATTCAATCTAGAGGCCTATTT | |
| | GGGGCCATTGCCGGTTTCATTGAAGGGGGGTGGACAGGGATGGTAG | |
| | ATGGATGGTACGGTTATCACCATCAAAATGAGCAGGGGTCAGGATAT | |
| | GCAGCCGACCTGAAGAGCACACAGAATGCCATTGACGAGATTACTAA | |
| | CAAAGTAAACTCTGTTATTGAAAAAATGAATACACAGTTCACAGCAGT | |
| | AGGTAAAGAGTTCAACCACCTGGAAAAAAGAATAGAGAATTTAAATAA | |
| | AAAAGTTGATGATGGTTTCCTGGACATTTGGACTTACAATGCCGAACT | |
| | GTTGGTTCTATTGGAAAATGAAAGAACTTTGGACTACCACGATTCAAA | |
| | GGTGAAGAACTTATATGAAAAGGTAAGAAGCCAGTTAAAAAACAATG | |
| | CCAAGGAAATTGGAAACGGCTGCTTTGAATTTTACCACAAATGTGATA | |
| | ACACGTGCATGGAAAGTGTCAAAAATGGGACTTATGACTACCCAAAA | |
| | TACTCAGAGGAAGCAAAATTAAACAGAGAAGAAATAGATGGGGTAAA | |
| | GCTGGAATCAACAAGGATTTACCAGATTTTGGCGATCTATTCAACCGT | |
| | CGCCAGTTCATTGGTACTGGTAGTCTCCCTGGGGGCAATCAGTTTCT | |
| | GGATGTGCTCTAATGGGTCTCTACAGTGTAGAATATGTATTTAATGAT | |
| | GA | |
| Pan-CoV-Flu | ATGAGCAAAAGCAGGGGATAATTCTATTAACCATGAAGACTATCATTG | 420 |
| Vaccine #32 | CTTTGAGCTACATTCTATGTCTGGTTTTCGCTCAAAAACTTCCTGGAA | |
| (H3N2) | ATGACAATAGCACTGCAACGCTGTGCCTTGGGCACCATGCAGTACCA | |
| | AACGGAACGATAGTGAAAACAATCACGAATGACCAAATTGAAGTTACT | |
| | AATGCTACTGAGCTGGTTCAGAATTCCTCAATAGGTGAAATATGCGA | |
| | CAGTCCTCATCAGATCCTTGATGGAGAAAACTGCACACTAATAGATG | |
| | CTCTATTGGGAGACCCTCAGTGTGATGGCTTTCAAAATAAGAAATGG | |
| | GACCTTTTTGTTGAACGAAGCAAAGCCTACAGCAACTGTTACCCTTAT | |
| | GATGTGCCGGATTATGCCTCCCTTAGGTCACTAGTTGCCTCATCCGG | |
| | CACACTGGAGTTTAACAATGAAAGCTTCAATTGGGCTGGAGTCACTC | |
| | AAAACGGAACAAGTTCTGCTTGCATAAGGGGATCTAATAGTAGTTTCT | |
| | TTAGTAGATTAAATTGGTTGACCCACTTAAACTTCAAGTACCCAGCAT | |
| | TGAACGTGACTATGCCAAACAATGAACAATTTGACAAATTGTACATTT | |
| | GGGGGGTTCACCACCCGGGTACGGACAAGGACCAAATCTTCCTGTA | |
| | TGCTCAATCATCAGGAAGAATCACAGTATCTACCAAAAGAAGCCAAC | |
| | AAGCTGTAATCCCGAATATCGGATCTAGACCCAGAATAAGGAATATC | |
| | CCTAGCAGAATAAGCATCTATTGGACAATAGTAAAACCGGGAGACAT | |
| | ACTTTTGATTAACAGCACAGGGAATCTAATTGCTCCTAGGGGTTACTT | |
| | CAAAATACGAAGTGGGAAAAGCTCAATAATGAGATCAGATGCACCCA | |
| | TTGGCAAATGCAAGTCTGAATGCATCACTCCAAATGGAAGCATTCCC | |
| | AATGACAAACCATTCCAAAATGTAAACAGGATCACATACGGGGCCTG | |
| | TCCCAGATATGTTAAGCAAAGCACTCTGAAATTGGCAACAGGAATGC | |
| | GAAATGTACCAGAGAAACAAACTAGAGGCATATTTGGCGCAATAGCG | |
| | GGTTTCATAGAAAATGGTTGGGAGGGAATGGTGGATGGTTGGTACG | |
| | GTTTCAGGCATCAAAATTCTGAGGGAAGAGGACAAGCAGCAGATCTC | |
| | AAAAGCACTCAAGCAGCAATCGATCAAATCAATGGGAAGCTGAATCG | |
| | ATTGATCGGGAAAACCAACGAGAAATTCCATCAGATTGAGAAAGAATT | |
| | CTCAGAAGTAGAAGGGAGAATTCAGGACCTTGAGAAATATGTTGAGG | |
| | ACACAAAAATAGATCTCTGGTCATACAACGCAGAGCTTCTTGTTGCCC | |
| | TGGAAAACCAACATACAATTGATCTAACTGACTCAGAAATGAACAAAC | |
| | TGTTTGAAAAAACAAAGAAGCAACTGAGGGAAAATGCTGAGGATATG | |
| | GGCAATGGTTGTTTCAAAATATACCACAAATGTGACAATGCCTGCATA | |
| | GGATCAATCAGAAATGGAACTTATGACCACGATGTATACAGGGATGA | |
| | AGCATTAAACAACCGGTTCCAGATCAAGGGAGTTGAGCTGAAGTCAG | |
| | GGTACAAAGATTGGATCCTATGGATTTCCTTTGCCATATCATGTTTTTT | |
| | GCTTTGTGTTGCTTTGTTGGGGTTCATCATGTGGGCCTGCCAAAAGG | |
| | GCAACATTAGGTGCAACATTTGCATTTGAGTGCATTAATTAAAAACAC | |
| | CCTTGTTTCTACTTGATGA | |
| Pan-CoV-Flu | ATGATTTTCTAATATCCACAAAATGAAGGCAATAATTGTACTACTCATG | 421 |
| Vaccine #33 | GTAGTAACATCCAATGCAGATCGAATCTGCACTGGGATAACATCGTC | |
| (H3N2) | AAACTCACCACATGTCGTCAAAACTGCTACTCAAGGGGAGGTCAACG | |
| | TGACCGGTGTAATACCACTGACAACAACACCCACCAAATCTCATTTTG | |
| | CAAATCTCAAAGGAACAGAAACCAGGGGGAAACTATGCCCAAAATGC | |
| | CTCAACTGCACAGATCTGGATGTAGCCTTGGGCAGACCAAAATGCAC | |
| | AGGGAAAATACCCTCTGCAAGGGTTTCAATACTCCATGAAGTCAGAC | |
| | CTGTTACATCTGGGTGCTTTCCTATAATGCACGATAGAACAAAAATTA | |
| | GACAGCTGCCTAACCTTCTCCGAGGATACGAACATGTCAGGTTATCA | |
| | ACTCACAACGTTATCAATGCAAAAGATGCACCAGGAAGACCCTACGA | |
| | AATTGGAACCTCAGGGTCTTGCCCTAACATTACCAATGGAAACGGAT | |
| | TCTTCGCAACAATGGCTTGGGCCGTCCCAAAAAACAAAACAGCAACA | |
| | AATCCATTAACAATAGAAGTACCATACATTTGTACAGAAGGAGAAGAC | |
| | CAAATTACCGTTTGGGGGTTCCACTCTGACAACGAGACCCAAATGGC | |
| | AAAGCTCTATGGGGACTCAAAGCCCCAGAAGTTCACCTCATCTGCCA | |
| | ACGGAGTGACCACACATTACGTTTCACAGATTGGTGGCTTCCCAAAT | |
| | CAAACAGAAGACGGAGGACTACCACAAAGTGGCAGAATTGTTGTTGA | |
| | TTACATGGTGCAGAAATCTGGAAAAACAGGAACAATTACCTATCAAAG | |
| | AGGTATTTTATTGCCTCAAAAAGTGTGGTGCGCAAGTGGCAGGAGCA | |
| | AGGTAATAAAAGGATCCTTGCCCTTAATTGGAGAAGCAGATTGCCTC | |
| | CATGAAAAATACGGTGGATTAAACAAAAGCAAGCCTTACTACACAGG | |
| | GGAACATGCAAAGGCCATAGGAAATTGCCCAATATGGGTGAAAACAC | |
| | CCTTGAAGCTGGCCAATGGAACCAAATATAGACCCCCTGCAAAACTA | |
| | TTAAAGGAAAGAGGTTTCTTCGGAGCCATTGCTGGTTTCTTAGAGGG | |
| | AGGATGGGAAGGAATGATTGCAGGTTGGCACGGATACACATCCCAT | |
| | GGGGCACATGGAGTAGCGGTGGCAGCTGACCTTAAGAGCACTCAAG | |
| | AGGCCATAAACAAGATAACAAAAAATCTCAACTCTTTGAGTGAGCTGG | |
| | AAGTAAAGAATCTTCAAAGACTAAGCGGTGCCATGGATGAACTCCAC | |
| | AACGAAATACTAGAACTAGATGAGAAAGTGGATGATCTCAGAGCTGA | |
| | CACAATAAGCTCACAAATAGAACTCGCAGTCCTGCTTTCCAATGAAG | |
| | GAATAATAAACAGTGAAGATGAACATCTCTTGGCGCTTGAAAGAAAG | |
| | CTGAAGAAAATGCTGGGCCCCTCTGCTGTAGAGATAGGGAATGGAT | |
| | GCTTTGAAACCAAACACAAGTGCAACCAGACCTGCCTCGACAGAATA | |
| | GCTGCTGGTACCTTTGATGCAGGAGAATTTTCTCTCCCCACCTTTGAT | |
| | TCACTGAATATTACTGCTGCATCTTTAAATGACGACGGATTGGACAAT | |
| | CATACTATACTGCTTTACTACTCAACTGCTGCCTCCAGTTTGGCTGTA | |
| | ACACTGATGATAGCTATCTTTGTTGTTTATATGGTCTCCAGAGACAAT | |
| | GTTTCTTGCTCCATTTGTCTATAAGGAAAGTTAAGCCCTGTATTTTCCT | |
| | TTATTGTAGTGCTTGTTTGCTTGTTGTCATTACAAAGAAACGTTATTGA | |
| | AAAATTGATGA | |

[0369] In some embodiments, the recombinant vaccine compositions described herein are used to prevent a coronavirus and/or influenza disease in a subject. In other embodiments, the recombinant vaccine compositions described herein are used to prevent a coronavirus and/or influenza infection prophylactically in a subject. In further embodiments, the recombinant vaccine compositions described herein elicits an immune response in a subject.

[0370] The present invention also features oligonucleotide compositions. For example, the present invention includes oligonucleotides disclosed in the sequence listings. The present invention also includes oligonucleotides in the form of antigen delivery systems. The present invention also includes oligonucleotides encoding the conserved large sequences disclosed herein. The present invention also includes oligonucleotide compositions comprising one or more oligonucleotides encoding any of the vaccine compositions according to the present invention. In some embodiments, the oligonucleotide comprises DNA. In some embodiments, the oligonucleotide comprises modified DNA. In some embodiments, the oligonucleotide comprises RNA. In some embodiments, the oligonucleotide comprises modified RNA. In some embodiments, the oligonucleotide comprises mRNA. In some embodiments, the oligonucleotide comprises modified mRNA.

[0371] Although there has been shown and described the preferred embodiment of the present invention, it will be readily apparent to those skilled in the art that modifications may be made thereto which do not exceed the scope of the appended claims. Therefore, the scope of the invention is only to be limited by the following claims. In some embodiments, the figures presented in this patent application are drawn to scale, including the angles, ratios of dimensions, etc. In some embodiments, the figures are representative only and the claims are not limited by the dimensions of the figures. In some embodiments, descriptions of the inventions described herein using the phrase “comprising” includes embodiments that could be described as “consisting essentially of” or “consisting of”, and as such the written description requirement for claiming one or more embodiments of the present invention using the phrase “consisting essentially of” or “consisting of” is met.

What is claimed:

1. A universal pre-emptive pan-Coronavirus vaccine composition, the composition comprising one or more large sequences, wherein the one or more large sequences comprise at least one of:
a) one or more conserved coronavirus B-cell target epitopes;
b) one or more conserved coronavirus CD4⁺ T cell target epitopes; and/or
c) one or more conserved coronavirus CD8⁺ T cell target epitopes;
wherein at least one epitope is derived from a non-spike protein.

2. The composition of claim 1, wherein the non-spike proteins are encoded by ORF1ab, ORF3a, ORF6, ORF7a, ORF7b, ORF8, or ORF10, or derived from an Envelope protein, a Membrane protein, or a Nucleocapsid protein.

3. The composition of claim 1, wherein at least one large sequence is highly conserved among human and animal Coronaviruses.

4. The composition of claim 1, wherein the one large sequence is derived from one or more of: one or more SARS-CoV-2 human strains or variants in current circulation; one or more SARS-CoV-2 variants identified in the future; one or more coronaviruses that has caused a previous human outbreak; one or more coronaviruses isolated from animals selected from a group consisting of bats, pangolins, civet cats, minks, camels, and other animal receptive to coronaviruses; or one or more coronaviruses that cause the common cold, past, current, and future coronavirus outbreaks.

5. The composition of claim 4, wherein the one or more SARS-CoV-2 human strains or variants in current circulation are selected from: variant B.1.177; variant B.1.160, variant B.1.1.7 (UK), variant P.1 (Japan/Brazil), variant B.1.351 (South Africa), variant B.1.427 (California), variant B.1.429 (California), variant B.1.258; variant B.1.221; variant B.1.367; variant B.1.1.277; variant B.1.1.302; variant B.1.525; variant B.1.526, variant S:677H; variant S:677P; B.1.617.2-Delta, variant B.1.1.529-Omicron (BA.1); sub-variant Omicron (BA.1); sub-variant Omicron (BA.2); sub-variant Omicron (BA.3); sub-variant Omicron (BA.4); sub-variant Omicron (BA.5).

6. The composition of claim 4, wherein the one or more coronaviruses that cause the common cold are selected from: 229E alpha coronavirus, NL63 alpha coronavirus, OC43 beta coronavirus, and HKU1 beta coronavirus.

7. The composition of claim 1, wherein at least one large sequence is a whole protein sequence expressed by SARS-CoV-2, a partial protein sequence expressed by SARS-CoV-2, or a combination thereof.

8. The composition of claim 7, wherein the whole protein sequence or the partial protein sequence expressed by SAR-CoV-2 is selected from SEQ ID NO: 182-193, SEQ ID NO: 148-159, SEQ ID NO: 360-383, and SEQ ID NO: 348-359.

9. The composition of claim 1 further comprising a T cell attracting chemokine, wherein the T cell attracting chemokine is CCL5, CXCL9, CXCL10, CXCL11, or a combination thereof.

10. The composition of claim 1 further comprising a composition that promotes T cell proliferation and T-cell memory, wherein the composition promotes T cell proliferation and memory is IL-7, IL-2, or IL-15.

11. The composition of claim 1, wherein the composition comprises any of SEQ ID NO: 139-147 and SEQ ID NO: 295-347.

12. The composition of claim 1, wherein the vaccine composition protects against disease caused by one or more coronavirus variants or coronavirus subvariants.

13. The composition of claim 12, wherein the coronavirus variants or coronavirus subvariants comprise past or currently circulating coronavirus variants or coronavirus subvariants wherein the coronavirus variants comprise alpha, beta, gamma, delta, and omicron.

14. The composition of claim 12, wherein the coronavirus variants or coronavirus subvariants comprise future variants or future subvariants of human and animal coronavirus.

15. The composition of claim 1, wherein the vaccine composition protects against infection and re-infection of coronavirus variants or coronavirus subvariants.

16. The composition of claim 15, wherein the coronavirus variants or coronavirus subvariants comprise past or currently circulating coronavirus variants or coronavirus subvariants, wherein the coronavirus variants comprise alpha, beta, gamma, delta, and omicron.

17. The composition of claim 15, wherein the coronavirus variants or coronavirus subvariants comprise future variants or future subvariants of human and animal coronavirus.

18. The composition of claim 15, wherein the vaccine composition protects against infection or reinfection of one or more coronavirus variants or coronavirus subvariant.

19. The composition of claim 18, wherein the vaccine composition protects against infection or reinfection of multiple coronavirus variants or coronavirus subvariants.

20. The composition of claim 18, wherein the vaccine composition protects against infection or re-infection of one coronavirus variants or coronavirus subvariants.

21. The composition of claim 1, wherein the vaccine composition induces strong and long-lasting protection mediated by antibodies (Abs), CD4+ T helper (Th1) cells, and/or CD8+ cytotoxic T-cells.

22. The composition of claim 1, wherein the composition protects against Sarbecoviruses, wherein sarbecoviruses comprise SARS-CoV1 or SARS-CoV2.

The application's sequence listing, which the Patent Office published only in electronic form, follows.

SEQUENCE LISTING (423 sequences)

SEQ ID NO: 1 - protein, 7096 aa, unidentified [sequence omitted]

SEQ ID NO: 2 - protein, 9 aa, Homo sapiens
VMVELVAEL

SEQ ID NO: 3 - protein, 9 aa, Homo sapiens
YLATALLTL

SEQ ID NO: 4 - protein, 9 aa, Homo sapiens
CLEASFNYL

SEQ ID NO: 5 - protein, 9 aa, Homo sapiens
WLMWLIINL

SEQ ID NO: 6 - protein, 9 aa, Homo sapiens
SLPGVFCGV

SEQ ID NO: 7 - protein, 9 aa, Homo sapiens
FLLNKEMYL

SEQ ID NO: 8 - protein, 9 aa, Homo sapiens
SMWALIISV

SEQ ID NO: 9 - protein, 9 aa, Homo sapiens
YLASGGQPI

SEQ ID NO: 10 - protein, 9 aa, Homo sapiens
KLSYGIATV

SEQ ID NO: 11 - protein, 9 aa, Homo sapiens
YLDAYNMMI

SEQ ID NO: 12 - protein, 9 aa, Homo sapiens
LLLDDFVEI

SEQ ID NO: 13 - protein, 9 aa, Homo sapiens
FVFLVLLPL

SEQ ID NO: 14 - protein, 9 aa, Homo sapiens
SIIAYTMSL

SEQ ID NO: 15 - protein, 9 aa, Homo sapiens
ALNTLVKQL

SEQ ID NO: 16 - protein, 9 aa, Homo sapiens
VLNDILSRL

SEQ ID NO: 17 - protein, 9 aa, Homo sapiens
RLQSLQTYV

SEQ ID NO: 18 - protein, 9 aa, Homo sapiens
FIAGLIAIV

SEQ ID NO: 19 - protein, 9 aa, Homo sapiens
FLAFVVFLL

SEQ ID NO: 20 - protein, 9 aa, Homo sapiens
FLLVTLAIL

SEQ ID NO: 21 - protein, 9 aa, Homo sapiens
FLLNKEMYL

SEQ ID NO: 22 - protein, 9 aa, Homo sapiens
IFLWLLWPV

SEQ ID NO: 23 - protein, 9 aa, Homo sapiens
GLMWLSYFI

SEQ ID NO: 24 - protein, 9 aa, Homo sapiens
HLVDFQVTI

SEQ ID NO: 25 - protein, 9 aa, Homo sapiens
IIFWFSLEL

SEQ ID NO: 26 - protein, 9 aa, Homo sapiens
YVVDDPCPI

SEQ ID NO: 27 - protein, 9 aa, Homo sapiens
YIDIGNYTV

SEQ ID NO: 28 - protein, 9 aa, Homo sapiens
YINVFAFPF

SEQ ID NO: 29 - protein, 9 aa, Homo sapiens
NVFAFPFTI

SEQ ID NO: 30 - protein, 8 aa, Homo sapiens
VMVELVAE

SEQ ID NO: 31 - protein, 8 aa, Homo sapiens
LATALLTL

SEQ ID NO: 32 - protein, 8 aa, Homo sapiens
CLEASFNY

SEQ ID NO: 33 - protein, 8 aa, Homo sapiens
LMWLIINL

SEQ ID NO: 34 - protein, 8 aa, Homo sapiens
SLPGVFCG

SEQ ID NO: 35 - protein, 8 aa, Homo sapiens
LLNKEMYL

SEQ ID NO: 36 - protein, 8 aa, Homo sapiens
SMWALIIS

SEQ ID NO: 37 - protein, 8 aa, Homo sapiens
LASGGQPI

SEQ ID NO: 38 - protein, 8 aa, Homo sapiens
KLSYGIAT

SEQ ID NO: 39 - protein, 8 aa, Homo sapiens
LDAYNMMI

SEQ ID NO: 40 - protein, 8 aa, Homo sapiens
LLLDDFVE

SEQ ID NO: 41 - protein, 8 aa, Homo sapiens
VFLVLLPL

SEQ ID NO: 42 - protein, 8 aa, Homo sapiens
SIIAYTMS

SEQ ID NO: 43 - protein, 8 aa, Homo sapiens
LNTLVKQL

SEQ ID NO: 44 - protein, 8 aa, Homo sapiens
VLNDILSR

SEQ ID NO: 45 - protein, 8 aa, Homo sapiens
LQSLQTYV

SEQ ID NO: 46 - protein, 8 aa, Homo sapiens
FIAGLIAI

SEQ ID NO: 47 - protein, 8 aa, Homo sapiens
LAFVVFLL

SEQ ID NO: 48 - protein, 8 aa, Homo sapiens
FLLVTLAI

SEQ ID NO: 49 - protein, 8 aa, Homo sapiens
LLNKEMYL

SEQ ID NO: 50 - protein, 8 aa, Homo sapiens
IFLWLLWP

SEQ ID NO: 51 - protein, 8 aa, Homo sapiens
LMWLSYFI

SEQ ID NO: 52 - protein, 8 aa, Homo sapiens
HLVDFQVT

SEQ ID NO: 53 - protein, 8 aa, Homo sapiens
IFWFSLEL

SEQ ID NO: 54 - protein, 8 aa, Homo sapiens
YVVDDPCP

SEQ ID NO: 55 - protein, 8 aa, Homo sapiens
IDIGNYTV

SEQ ID NO: 56 - protein, 8 aa, Homo sapiens
YINVFAFP

SEQ ID NO: 57 - protein, 8 aa, Homo sapiens
VFAFPFTI

SEQ ID NO: 58 - protein, 15 aa, Homo sapiens
KSAFYILPSIISNEK

SEQ ID NO: 59 - protein, 15 aa, Homo sapiens
ESPFVMMSAPPAQYE

SEQ ID NO: 60 - protein, 15 aa, Homo sapiens
PNMLRIMASLVLARK

SEQ ID NO: 61 - protein, 14 aa, Homo sapiens
RIKVQMLSDTLKNL

SEQ ID NO: 62 - protein, 15 aa, Homo sapiens
LDAYNMMISAGFSLW

SEQ ID NO: 63 - protein, 13 aa, Homo sapiens
MFVFLVLLPLVSS

SEQ ID NO: 64 - protein, 15 aa, Homo sapiens
FLAFVVFLLVTLAIL

SEQ ID NO: 65 - protein, 15 aa, Homo sapiens
FLLVTLAILTALRLC

SEQ ID NO: 66 - protein, 15 aa, Homo sapiens
LSYYKLGASQRVAGD

SEQ ID NO: 67 - protein, 15 aa, Homo sapiens
AEILLIIMRTFKVSI

SEQ ID NO: 68 - protein, 15 aa, Homo sapiens
MKIILFLALITLATC

SEQ ID NO: 69 - protein, 14 aa, Homo sapiens
IIFLALITLATCEL

SEQ ID NO: 70 - protein, 15 aa, Homo sapiens
SPIFLIVAAIVFITL

SEQ ID NO: 71 - protein, 15 aa, Homo sapiens
DFYLCFLAFLLFLVL

SEQ ID NO: 72 - protein, 15 aa, Homo sapiens
MKFLVFLGIITTVAA

SEQ ID NO: 73 - protein, 16 aa, Homo sapiens
KQQTVTLLPAADLDDF

SEQ ID NO: 74 - protein, 14 aa, Homo sapiens
KSAFYILPSIISNE

SEQ ID NO: 75 - protein, 14 aa, Homo sapiens
ESPFVMMSAPPAQY

SEQ ID NO: 76 - protein, 14 aa, Homo sapiens
PNMLRIMASLVLAR

SEQ ID NO: 77 - protein, 13 aa, Homo sapiens
RIKVQMLSDTLKN

SEQ ID NO: 78 - protein, 14 aa, Homo sapiens
LDAYNMMISAGFSL

SEQ ID NO: 79 - protein, 12 aa, Homo sapiens
MFVFLVLLPLVS

SEQ ID NO: 80 - protein, 14 aa, Homo sapiens
FLAFVVFLLVTLAI

SEQ ID NO: 81 - protein, 14 aa, Homo sapiens
FLLVTLAILTALRL

SEQ ID NO: 82 - protein, 14 aa, Homo sapiens
LSYYKLGASQRVAG

SEQ ID NO: 83 - protein, 14 aa, Homo sapiens
AEILLIIMRTFKVS

SEQ ID NO: 84 - protein, 14 aa, Homo sapiens
MKIILFLALITLAT

SEQ ID NO: 85 - protein, 13 aa, Homo sapiens
IIFLALITLATCE

SEQ ID NO: 86 - protein, 14 aa, Homo sapiens
SPIFLIVAAIVFIT

SEQ ID NO: 87 - protein, 14 aa, Homo sapiens
DFYLCFLAFLLFLV

SEQ ID NO: 88 - protein, 14 aa, Homo sapiens
MKFLVFLGIITTVA

SEQ ID NO: 89 - protein, 15 aa, Homo sapiens
KQQTVTLLPAADLDD

SEQ ID NO: 90 - protein, 14 aa, Homo sapiens
SAFYILPSIISNEK

SEQ ID NO: 91 - protein, 14 aa, Homo sapiens
SPFVMMSAPPAQYE

SEQ ID NO: 92 - protein, 14 aa, Homo sapiens
NMLRIMASLVLARK

SEQ ID NO: 93 - protein, 13 aa, Homo sapiens
IKVQMLSDTLKNL

SEQ ID NO: 94 - protein, 14 aa, Homo sapiens
DAYNMMISAGFSLW

SEQ ID NO: 95 - protein, 12 aa, Homo sapiens
FVFLVLLPLVSS

SEQ ID NO: 96 - protein, 14 aa, Homo sapiens
LAFVVFLLVTLAIL

SEQ ID NO: 97 - protein, 14 aa, Homo sapiens
LLVTLAILTALRLC

SEQ ID NO: 98 - protein, 14 aa, Homo sapiens
SYYKLGASQRVAGD

SEQ ID NO: 99 - protein, 14 aa, Homo sapiens
EILLIIMRTFKVSI

SEQ ID NO: 100 - protein, 14 aa, Homo sapiens
KIILFLALITLATC

SEQ ID NO: 101 - protein, 13 aa, Homo sapiens
IFLALITLATCEL

SEQ ID NO: 102 - protein, 14 aa, Homo sapiens
PIFLIVAAIVFITL

SEQ ID NO: 103 - protein, 14 aa, Homo sapiens
FYLCFLAFLLFLVL

SEQ ID NO: 104 - protein, 14 aa, Homo sapiens
KFLVFLGIITTVAA

SEQ ID NO: 105 - protein, 15 aa, Homo sapiens
QQTVTLLPAADLDDF

SEQ ID NO: 106 - protein, 25 aa, Homo sapiens
SQCVNLTTRTQLPPAYTNSFTRGVY

SEQ ID NO: 107 - protein, 23 aa, Homo sapiens
FSNVTWFHAIHVSGTNGTKRFDN

SEQ ID NO: 108 - protein, 31 aa, Homo sapiens
DAVDCALDPLSETKCTLKSFTVEKGIYQTSN

SEQ ID NO: 109 - protein, 40 aa, Homo sapiens
GTNTSNQVAVLYQDVNCTEVPVAIHADQLTPTWRVYSTGS

SEQ ID NO: 110 - protein, 75 aa, Homo sapiens
VCGPKKSTNLVKNKCVNFNFNGLTGTGVLTESNKKFLPFQQFGRDIADTTDAVRDPQTLEILDITPCSFGGVSVI

SEQ ID NO: 111 - protein, 62 aa, Homo sapiens
NLDSKVGGNYNYLYRLFRKSNLKPFERDISTEIYQAGSTPCNGVEGFNCYFPLQSYGFQPTE

SEQ ID NO: 112 - protein, 25 aa, Homo sapiens
YNSASFSTFKCYGVSPTKLNDLCFT

SEQ ID NO: 113 - protein, 35 aa, Homo sapiens
FPNITNLCPFGEVFNATRFASVYAWNRKRISNCVA

SEQ ID NO: 114 - protein, 40 aa, Homo sapiens
VNNTVYDPLQPELDSFKEELDKYFKNHTSPDVDLGDISGI

SEQ ID NO: 115 - protein, 18 aa, Homo sapiens
FSQILPDPSKPSKRSFIE

SEQ ID NO: 116 - protein, 22 aa, Homo sapiens
FGAGAALQIPFAMQMAYRFNGI

SEQ ID NO: 117 - protein, 23 aa, Homo sapiens
SQCVNLTTRTQLPPAYTNSFTRG

SEQ ID NO: 118 - protein, 21 aa, Homo sapiens
FSNVTWFHAIHVSGTNGTKRF

SEQ ID NO: 119 - protein, 29 aa, Homo sapiens
DAVDCALDPLSETKCTLKSFTVEKGIYQT

SEQ ID NO: 120 - protein, 38 aa, Homo sapiens
GTNTSNQVAVLYQDVNCTEVPVAIHADQLTPTWRVYST

SEQ ID NO: 121 - protein, 73 aa, Homo sapiens
VCGPKKSTNLVKNKCVNFNFNGLTGTGVLTESNKKFLPFQQFGRDIADTTDAVRDPQTLEILDITPCSFGGVS

SEQ ID NO: 122 - protein, 60 aa, Homo sapiens
NLDSKVGGNYNYLYRLFRKSNLKPFERDISTEIYQAGSTPCNGVEGFNCYFPLQSYGFQP

SEQ ID NO: 123 - protein, 23 aa, Homo sapiens
YNSASFSTFKCYGVSPTKLNDLC

SEQ ID NO: 124 - protein, 33 aa, Homo sapiens
FPNITNLCPFGEVFNATRFASVYAWNRKRISNC

SEQ ID NO: 125 - protein, 38 aa, Homo sapiens
VNNTVYDPLQPELDSFKEELDKYFKNHTSPDVDLGDIS

SEQ ID NO: 126 - protein, 16 aa, Homo sapiens
FSQILPDPSKPSKRSF

SEQ ID NO: 127 - protein, 20 aa, Homo sapiens
FGAGAALQIPFAMQMAYRFN

SEQ ID NO: 128 - protein, 23 aa, Homo sapiens
CVNLTTRTQLPPAYTNSFTRGVY

SEQ ID NO: 129 - protein, 21 aa, Homo sapiens
NVTWFHAIHVSGTNGTKRFDN

SEQ ID NO: 130 - protein, 29 aa, Homo sapiens
VDCALDPLSETKCTLKSFTVEKGIYQTSN

SEQ ID NO: 131 - protein, 38 aa, Homo sapiens
NTSNQVAVLYQDVNCTEVPVAIHADQLTPTWRVYSTGS

SEQ ID NO: 132 - protein, 73 aa, Homo sapiens
GPKKSTNLVKNKCVNFNFNGLTGTGVLTESNKKFLPFQQFGRDIADTTDAVRDPQTLEILDITPCSFGGVSVI

SEQ ID NO: 133 - protein, 60 aa, Homo sapiens
DSKVGGNYNYLYRLFRKSNLKPFERDISTEIYQAGSTPCNGVEGFNCYFPLQSYGFQPTE

SEQ ID NO: 134 - protein, 23 aa, Homo sapiens
SASFSTFKCYGVSPTKLNDLCFT

SEQ ID NO: 135 - protein, 33 aa, Homo sapiens
NITNLCPFGEVFNATRFASVYAWNRKRISNCVA

SEQ ID NO: 136 - protein, 38 aa, Homo sapiens
NTVYDPLQPELDSFKEELDKYFKNHTSPDVDLGDISGI

SEQ ID NO: 137 - protein, 16 aa, Homo sapiens
QILPDPSKPSKRSFIE

SEQ ID NO: 138 - protein, 20 aa, Homo sapiens
AGAALQIPFAMQMAYRFNGI

SEQ ID NO: 139 - DNA, 7235 bp, synthetic construct
  misc_feature 1..7235: note = Synthesized Vaccine Candidate 1
  source 1..7235: mol_type = other DNA
ctcgacattgattattgactagttattaatagtaatcaattacggggtcattagttcatagcccatatatggagttccgcgttacataacttacggtaaatggcccgcctggctgaccgcccaacgacccccgcccattgacgtcaataatgacgtatgttcccatagtaacgccaatagggactttccattgacgtcaatgggtggagtatttacggtaaactgcccacttggcagtacatcaagtgtatcatatgccaagtacgccccctattgacgtcaatgacggtaaatggcccgcctggcattatgcccagtacatgaccttatgggactttcctacttggcagtacatctacgtattagtcatcgctattaccatggtcgaggtgagccccacgttctgcttcactctccccatctcccccccctccccacccccaattttgtatttatttattttttaattattttgtgcagcgatgggggcggggggggggggggggcgcgcgccaggcggggcggggcggggcgaggggcggggcggggcgaggcggagaggtgcggcggcagccaatcagagcggcgcgctccgaaagtttccttttatggcgaggcggcggcggcggcggccctataaaaagcgaagcgcgcggcgggcgggagtcgctgcgcgctgccttcgccccgtgccccgctccgccgccgcctcgcgccgcccgccccggctctgactgaccgcgttactcccacaggtgagcgggcgggacggcccttctcctccgggctgtaattagcgcttggtttaatgacggcttgtttcttttctgtggctgcgtgaaagccttgaggggctccgggagggccctttgtgcggggggagcggctcggggggtgcgtgcgtgtgtgtgtgcgtggggagcgccgcgtgcggctccgcgctgcccggcggctgtgagcgctgcgggcgcggcgcggggctttgtgcgctccgcagtgtgcgcgaggggagcgcggccgggggcggtgccccgcggtgcggggggggctgcgaggggaacaaaggctgcgtgcggggtgtgtgcgtgggggggtgagcagggggtgtgggcgcgtcggtcgggctgcaaccccccctgcacccccctccccgagttgctgagcacggcccggcttcgggtgcggggctccgtacggggcgtggcgcggggctcgccgtgccgggcggggggtggcggcaggtgggggtgccgggcggggcggggccgcctcgggccggggagggctcgggggaggggcgcggcggcccccggagcgccggcggctgtcgaggcgcggcgagccgcagccattgccttttatggtaatcgtgcgagagggcgcagggacttcctttgtcccaaatctgtgcggagccgaaatctgggaggcgccgccgcaccccctctagcgggcgcggggcgaagcggtgcggcgccggcaggaaggaaatgggcggggagggccttcgtgcgtcgccgcgccgccgtccccttctccctctccagcctcggggctgtccgcggggggacggctgccttcgggggggacggggcagggcggggttcggcttctggcgtgtgaccggcggctctagagcctctgctaaccatgttcatgccttcttctttttcctacagctcctgggcaacgtgctggttattgtgctgtctcatcattttggcaaagaattggagaataaactagtattcttctggtccccacagactcagagagaacccgccaccatgttcgtgttcctggtgctgctgcccctggtgagcagccagtgcgtgaacctgaccaccaggacccagctgccccccgcctacaccaacagcttcaccaggggcgtgtactaccccgacaaggtgttcaggagcagcgtgctgcacagcacccaggacctgttcctgcccttcttcagcaacgtgacctggttccacgccatccacgtgagcggcaccaacggcaccaagaggttcgacaaccccgtgctgcccttcaacgacggcgtgtacttcgccagcaccgagaagagcaacatcatcaggggctggatcttcggcaccaccctggacagcaagacccagagcctgctgatcgtgaacaacgccaccaacgtggtgatcaaggtgtgcgagttccagttctgcaacgaccccttcctgggcgtgtactaccacaagaacaacaagagctggatggagagcgagttcagggtgtacagcagcgccaacaactgcaccttcgagtacgtgagccagcccttcctgatggacctggagggcaagcagggcaacttcaagaacctgagggagttcgtgttcaagaacatcgacggctacttcaagatctacagcaagcacacccccatcaacctggtgagggacctgccccagggcttcagcgccctggagcccctggtggacctgcccatcggcatcaacatcaccaggttccagaccctgctggccctgcacaggagctacctgacccccggcgacagcagcagcggctggaccgccggcgccgccgcctactacgtgggctacctgcagcccaggaccttcctgctgaagtacaacgagaacggcaccatcaccgacgccgtggactgcgccctggaccccctgagcgagaccaagtgcaccctgaagagcttcaccgtggagaagggcatctaccagaccagcaacttcagggtgcagcccaccgagagcatcgtgaggttccccaacatcaccaacctgtgccccttcggcgaggtgttcaacgccaccaggttcgccagcgtgtacgcctggaacaggaagaggatcagcaactgcgtggccgactacagcgtgctgtacaacagcgccagcttcagcaccttcaagtgctacggcgtgagccccaccaagctgaacgacctgtgcttcaccaacgtgtacgccgacagcttcgtgatcaggggcgacgaggtgaggcagatcgcccccggccagaccggcaagatcgccgactacaactacaagctgcccgacgacttcaccggctgcgtgatcgcctggaacagcaacaacctggacagcaaggtgggcggcaactacaactacctgtacaggctgttcaggaagagcaacctgaagcccttcgagagggacatcagcaccgagatctaccaggccggcagcaccccctgcaacggcgtggagggcttcaactgctacttccccctgcagagctacggcttccagcccaccaacggcgtgggctaccagccctacagggtggtggtgctgagcttcgagctgctgcacgcccccgccaccgtgtgcggccccaagaagagcaccaacctggtgaagaacaagtgcgtgaacttcaacttcaacggcctgaccggcaccggcgtgctgaccgagagcaacaagaagttcctgcccttccagcagttcggcagggacatcgccgacaccaccgacgccgtgagggacccccagaccctggagatcctggacatcaccccctgcagcttcggcggcgtgagcgtgatcacccccggcaccaacaccagcaaccaggtggccgtgctgtaccaggacgtgaactgcaccgaggtgcccgtggccatccacgccgaccagctgacccccacctggagggtgtacagcaccggcagcaacgtgttccagaccagggccggctgcctgatcggcgccgagcacgtgaacaacagctacgagtgcgacatccccatcggcgccggcatctgcgccagctaccagacccagaccaacagccccggcagcgccagcagcgtggccagccagagcatcatcgcctacaccatgagcctgggcgccgagaacagcgtggcctacagcaacaacagcatcgccatccccaccaacttcaccatcagcgtgaccaccgagatcctgcccgtgagcatgaccaagaccagcgtggactgcaccatgtacatctgcggcgacagcaccgagtgcagcaacctgctgctgcagtacggcagcttctgcacccagctgaacagggccctgaccggcatcgccgtggagcaggacaagaacacccaggaggtgttcgcccaggtgaagcagatctacaagaccccccccatcaaggacttcggcggcttcaacttcagccagatcctgcccgaccccagcaagcccagcaagaggagccccatcgaggacctgctgttcaacaaggtgaccctggccgacgccggcttcatcaagcagtacggcgactgcctgggcgacatcgccgccagggacctgatctgcgcccagaagttcaacggcctgaccgtgctgccccccctgctgaccgacgagatgatcgcccagtacaccagcgccctgctggccggcaccatcaccagcggctggaccttcggcgccggccccgccctgcagatccccttccccatgcagatggcctacaggttcaacggcatcggcgtgacccagaacgtgctgtacgagaaccagaagctgatcgccaaccagttcaacagcgccatcggcaagatccaggacagcctgagcagcacccccagcgccctgggcaagctgcaggacgtggtgaaccagaacgcccaggccctgaacaccctggtgaagcagctgagcagcaacttcggcgccatcagcagcgtgctgaacgacatcctgagcaggctggacccccccgaggccgaggtgcagatcgacaggctgatcaccggcaggctgcagagcctgcagacctacgtgacccagcagctgatcagggccgccgagatcagggccagcgccaacctggccgccaccaagatgagcgagtgcgtgctgggccagagcaagagggtggacttctgcggcaagggctaccacctgatgagcttcccccagagcgccccccacggcgtggtgttcctgcacgtgacctacgtgcccgcccaggagaagaacttcaccaccgcccccgccatctgccacgacggcaaggcccacttccccagggagggcgtgttcgtgagcaacggcacccactggttcgtgacccagaggaacttctacgagccccagatcatcaccaccgacaacaccttcgtgagcggcaactgcgacgtggtgatcggcatcgtgaacaacaccgtgtacgaccccctgcagcccgagctggacagcttcaaggaggagctggacaagtacttcaagaaccacaccagccccgacgtggacctgggcgacatcagcggcatcaacgccagcgtggtgaacatccagaaggagatcgacaggctgaacgaggtggccaagaacctgaacgagagcctgatcgacctgcaggagctgggcaagtacgagcagtacatcaagtggccctggtacatctggctgggcttcatcgccggcctgatcgccatcgtgatggtgaccatcatgctgtgctgcatgaccagctgctgcagctgcctgaagggctgctgcagctgcggcagctgctgcaagttcgacgaggacgacagcgagcccgtgctgaagggcgtgaagctgcactacaccggaagcggagccacgaacttctctctgttaaagcaagcaggagatgttgaagaaaaccccgggcctatgagcgacaacggcccccagaaccagaggaacgcccccaggatcaccttcggcggccccagcgacagcaccggcagcaaccagaacggcgagaggagcggcgccaggagcaagcagaggaggccccagggcctgcccaacaacaccgccagctggttcaccgccctgacccagcacggcaaggaggacctgaagttccccaggggccagggcgtgcccatcaacaccaacagcagccccgacgaccagatcggctactacaggagggccaccaggaggatcaggggcggcgacggcaagatgaaggacctgagccccaggtggtacttctactacctgggcaccggccccgaggccggcctgccctacggcgccaacaaggacggcatcatctgggtggccaccgagggcgccctgaacacccccaaggaccacatcggcaccaggaaccccgccaacaacgccgccatcgtgctgcagctgccccagggcaccaccctgcccaagggcttctacgccgagggcagcaggggcggcagccaggccagcagcaggagcagcagcaggagcaggaacagcagcaggaacagcacccccggcagcagcaggggcaccagccccgccaggatggccggcaacggcggcgacgccgccctggccctgctgctgctggacaggctgaaccagctggagagcaagatgagcggcaagggccagcagcagcagggccagaccgtgaccaagaagagcgccgccgaggccagcaagaagcccaggcagaagaggaccgccaccaaggcctacaacgtgacccaggccttcggcaggaggggccccgagcagacccagggcaacttcggcgaccaggagctgatcaggcagggcaccgactacaagcactggccccagatcgcccagttcgcccccagcgccagcgccttcttcggcatgagcaggatcggcatggaggtgacccccagcggcacctggctgacctacaccggcgccatcaagctggacgacaaggaccccaacttcaaggaccaggtgatcctgctgaacaagcacatcgacgcctacaagaccttcccccccaccgagcccaagaaggacaagaagaagaaggccgacgagacccaggccctgccccagaggcagaagaagcagcagaccgtgaccctgctgcccgccgccgacctggacgacttcagcaagcagctgcagcagagcatgagcagcgccgacagcacccaggcctgactcgagctggtactgcatgcacgcaatgctagctgcccctttcccgtcctgggtaccccgagtctcccccgacctcgggtcccaggtatgctcccacctccacctgccccactcaccacctctgctagttccagacacctcccaagcacgcagcaatgcagctcaaaacgcttagcctagccacacccccacgggaaacagcagtgattaacctttagcaataaacgaaagtttaactaagctatactaaccccagggttggtcaatttcgtgccagccacaccctggagctagcaaaaaaaa

SEQ ID NO: 140 - DNA, 9663 bp, synthetic construct
  misc_feature 1..9663: note = Synthesized Vaccine Candidate 2
  source 1..9663: mol_type = other DNA
ctcgacattgattattgactagttattaatagtaatcaattacggggtcattagttcatagcccatatatggagttccgcgttacataacttacggtaaatggcccgcctggctgaccgcccaacgacccccgcccattgacgtcaataatgacgtatgttcccatagtaacgccaatagggactttccattgacgtcaatgggtggagtatttacggtaaactgcccacttggcagtacatcaagtgtatcatatgccaagtacgccccctattgacgtcaatgacggtaaatggcccgcctggcattatgcccagtacatgaccttatgggactttcctacttggcagtacatctacgtattagtcatcgctattaccatggtcgaggtgagccccacgttctgcttcactctccccatctcccccccctccccacccccaattttgtatttatttattttttaattattttgtgcagcgatgggggcggggggggggggggggcgcgcgccaggcggggcggggcggggcgaggggcggggcggggcgaggcggagaggtgcggcggcagccaatcagagcggcgcgctccgaaagtttccttttatggcgaggcggcggcggcggcggccctataaaaagcgaagcgcgcggcgggcgggagtcgctgcgcgctgccttcgccccgtgccccgctccgccgccgcctcgcgccgcccgccccggctctgactgaccgcgttactcccacaggtgagcgggcgggacggcccttctcctccgggctgtaattagcgcttggtttaatgacggcttgtttcttttctgtggctgcgtgaaagccttgaggggctccgggagggccctttgtgcggggggagcggctcggggggtgcgtgcgtgtgtgtgtgcgtggggagcgccgcgtgcggctccgcgctgcccggcggctgtgagcgctgcgggcgcggcgcggggctttgtgcgctccgcagtgtgcgcgaggggagcgcggccgggggcggtgccccgcggtgcggggggggctgcgaggggaacaaaggctgcgtgcggggtgtgtgcgtgggggggtgagcagggggtgtgggcgcgtcggtcgggctgcaaccccccctgcacccccctccccgagttgctgagcacggcccggcttcgggtgcggggctccgtacggggcgtggcgcggggctcgccgtgccgggcggggggtggcggcaggtgggggtgccgggcggggcggggccgcctcgggccggggagggctcgggggaggggcgcggcggcccccggagcgccggcggctgtcgaggcgcggcgagccgcagccattgccttttatggtaatcgtgcgagagggcgcagggacttcctttgtcccaaatctgtgcggagccgaaatctgggaggcgccgccgcaccccctctagcgggcgcggggcgaagcggtgcggcgccggcaggaaggaaatgggcggggagggccttcgtgcgtcgccgcgccgccgtccccttctccctctccagcctcggggctgtccgcggggggacggctgccttcgggggggacggggcagggcggggttcggcttctggcgtgtgaccggcggctctagagcctctgctaaccatgttcatgccttcttctttttcctacagctcctgggcaacgtgctggttattgtgctgtctcatcattttggcaaagaattggagaataaactagtattcttctggtccccacagactcagagagaacccgccaccatgttcgtgttcctggtgctgctgcccctggtgagcagccagtgcgtgaacctgaccaccaggacccagctgccccccgcctacaccaacagcttcaccaggggcgtgtactaccccgacaaggtgttcaggagcagcgtgctgcacagcacccaggacctgttcctgcccttcttcagcaacgtgacctggttccacgccatccacgtgagcggcaccaacggcaccaagaggttcgacaaccccgtgctgcccttcaacgacggcgtgtacttcgccagcaccgagaagagcaacatcatcaggggctggatcttcggcaccaccctggacagcaagacccagagcctgctgatcgtgaacaacgccaccaacgtggtgatcaaggtgtgcgagttccagttctgcaacgaccccttcctgggcgtgtactaccacaagaacaacaagagctggatggagagcgagttcagggtgtacagcagcgccaacaactgcaccttcgagtacgtgagccagcccttcctgatggacctggagggcaagcagggcaacttcaagaacctgagggagttcgtgttcaagaacatcgacggctacttcaagatctacagcaagcacacccccatcaacctggtgagggacctgccccagggcttcagcgccctggagcccctggtggacctgcccatcggcatcaacatcaccaggttccagaccctgctggccctgcacaggagctacctgacccccggcgacagcagcagcggctggaccgccggcgccgccgcctactacgtgggctacctgcagcccaggaccttcctgctgaagtacaacgagaacggcaccatcaccgacgccgtggactgcgccctggaccccctgagcgagaccaagtgcaccctgaagagcttcaccgtggagaagggcatctaccagaccagcaacttcagggtgcagcccaccgagagcatcgtgaggttccccaacatcaccaacctgtgccccttcggcgaggtgttcaacgccaccaggttcgccagcgtgtacgcctggaacaggaagaggatcagcaactgcgtggccgactacagcgtgctgtacaacagcgccagcttcagcaccttcaagtgctacggcgtgagccccaccaagctgaacgacctgtgcttcaccaacgtgtacgccgacagcttcgtgatcaggggcgacgaggtgaggcagatcgcccccggccagaccggcaagatcgccgactacaactacaagctgcccgacgacttcaccggctgcgtgatcgcctggaacagcaacaacctggacagcaaggtgggcggcaactacaactacctgtacaggctgttcaggaagagcaacctgaagcccttcgagagggacatcagcaccgagatctaccaggccggcagcaccccctgcaacggcgtggagggcttcaactgctacttccccctgcagagctacggcttccagcccaccaacggcgtgggctaccagccctacagggtggtggtgctgagcttcgagctgctgcacgcccccgccaccgtgtgcggccccaagaagagcaccaacctggtgaagaacaagtgcgtgaacttcaacttcaacggcctgaccggcaccggcgtgctgaccgagagcaacaagaagttcctgcccttccagcagttcggcagggacatcgccgacaccaccgacgccgtgagggacccccagaccctggagatcctggacatcaccccctgcagcttcggcggcgtgagcgtgatcacccccggcaccaacaccagcaaccaggtggccgtgctgtaccaggacgtgaactgcaccgaggtgcccgtggccatccacgccgaccagctgacccccacctggagggtgtacagcaccggcagcaacgtgttccagaccagggccggctgcctgatcggcgccgagcacgtgaacaacagctacgagtgcgacatccccatcggcgccggcatctgcgccagctaccagacccagaccaacagccccggcagcgccagcagcgtggccagccagagcatcatcgcctacaccatgagcctgggcgccgagaacagcgtggcctacagcaacaacagcatcgccatccccaccaacttcaccatcagcgtgaccaccgagatcctgcccgtgagcatgaccaagaccagcgtggactgcaccatgtacatctgcggcgacagcaccgagtgcagcaacctgctgctgcagtacggcagcttctgcacccagctgaacagggccctgaccggcatcgccgtggagcaggacaagaacacccaggaggtgttcgcccaggtgaagcagatctacaagaccccccccatcaaggacttcggcggcttcaacttcagccagatcctgcccgaccccagcaagcccagcaagaggagccccatcgaggacctgctgttcaacaaggtgaccctggccgacgccggcttcatcaagcagtacggcgactgcctgggcgacatcgccgccagggacctgatctgcgcccagaagttcaacggcctgaccgtgctgccccccctgctgaccgacgagatgatcgcccagtacaccagcgccctgctggccggcaccatcaccagcggctggaccttcggcgccggccccgccctgcagatccccttccccatgcagatggcctacaggttcaacggcatcggcgtgacccagaacgtgctgtacgagaaccagaagctgatcgccaaccagttcaacagcgccatcggcaagatccaggacagcctgagcagcacccccagcgccctgggcaagctgcaggacgtggtgaaccagaacgcccaggccctgaacaccctggtgaagcagctgagcagcaacttcggcgccatcagcagcgtgctgaacgacatcctgagcaggctggacccccccgaggccgaggtgcagatcgacaggctgatcaccggcaggctgcagagcctgcagacctacgtgacccagcagctgatcagggccgccgagatcagggccagcgccaacctggccgccaccaagatgagcgagtgcgtgctgggccagagcaagagggtggacttctgcggcaagggctaccacctgatgagcttcccccagagcgccccccacggcgtggtgttcctgcacgtgacctacgtgcccgcccaggagaagaacttcaccaccgcccccgccatctgccacgacggcaaggcccacttccccagggagggcgtgttcgtgagcaacggcacccactggttcgtgacccagaggaacttctacgagccccagatcatcaccaccgacaacaccttcgtgagcggcaactgcgacgtggtgatcggcatcgtgaacaacaccgtgtacgaccccctgcagcccgagctggacagcttcaaggaggagctggacaagtacttcaagaaccacaccagccccgacgtggacctgggcgacatcagcggcatcaacgccagcgtggtgaacatccagaaggagatcgacaggctgaacgaggtggccaagaacctgaacgagagcctgatcgacctgcaggagctgggcaagtacgagcagtacatcaagtggccctggtacatctggctgggcttcatcgccggcctgatcgccatcgtgatggtgaccatcatgctgtgctgcatgaccagctgctgcagctgcctgaagggctgctgcagctgcggcagctgctgcaagttcgacgaggacgacagcgagcccgtgctgaagggcgtgaagctgcactacaccggaagcggagccacgaacttctctctgttaaagcaagcaggagatgttgaagaaaaccccgggcctcaaaccactgaaacagcwcactcttgtaatgttaaccgctttaatgtggctattacaagagcaaaaattggcattttgtgcataatgtctgacagagatctttatgacaagctgcaattcacaagtctagaagtaccgcgtcgtaacgtggctacattacaagcggaaaatgtaactggactctttaaggactgtagtaagatcataactggtcttcatcctacacaagcacctacacaccttagtgttgatacaaaattcaagactgagggactatgtgttgacataccaggcatwccwaaggacatgacctatmgwagactcatctcyatgatgggtttcaaaatgaattaycaagttaatggttaccctaayatgttyatcacccgygargaagccatmmgmcaygtwcgtgcatggattggctttgatgtagagggktgtcatgctactagggatgctgtcggtactaacctacctctccagttaggattttctacaggtgttaacttagtagctgtaccaactggctatgttgacactgaaaacaatacagaattcaccagagttaatgcaaaacctccaccaggtgaccaatttaaacatcttataccacttatgtacaaaggtttaccctggaacatagtgcgtatcaagatagtacaaatgctcagtgatacactgaaaggattatcrgacagagttgtgtttgtcctatgggcacatggctttgaacttacatcaatgaagtactttgtcaagattggacctgaaagaacgtgttgtctgtgtgacaaacgtgcaacttgtttttctacttcatcagacaattatgcctgctggaaccattctgtgggttttgactatgtctataatccatttatgattgatgtccagcagtggggttttacaggtaaccttcagagtaatcacgatcagcattgccaagtgcatggcaacgctcatgtggctagttgtgatgctatcatgactagatgtttagcagtccatgagtgctttgttaagcgcgttgactggtctgttgagtacccaattataggtgatgaactgaagatcaatgccgcatgcagaaaagtgcaacatatggttgtaaagtctgcattgcttgctgacaaattcccagttcttcatgacattggaaacccaaaggctatcaaatgtgtcccrcaggctgaagtggattggaagttctatgatgctcagccctgcagtgacaaagcttataaaataaaagaactcttctattcttatgctacacatcatgataaattcattgatggtgtttgtttattttggaattgtaacgttgatcgttaccctgccaatgctattgtrtgcaggttcgacacgagagtcttgtcaaatttgaacttgccaggttgtgatggtggtagtttgtatgtaaataagcatgcattccacactccagcttttgataaaagtgcatttactaatttaaagcaattgcctttcttttattactctgacagtccctgtgagtcacatggcaagcaggttgtttctgacattgattatgtaccactcaaatctgctacrtgtataacacgatgcaatttgggrggtgctgtttgcagacatcatgcaaatgagtaccgacagtacttggatgcatacaatatgatgatttctgctggctttagcctctggatttacaaacagtttgacacttataacctgtggaacacctttaccaggttacagagtttagaaaatgtggcttacaatgttgttaacaaaggacacttcgatggacaagctggtgaagcacctgtttccgtcattaataatgttgtttacacaaaggtagatggtgttgatgtagagatctttgaaaacaagacaacacttcctgttaatgttgcatttgagctttgggctaagcgtaacattaaaccagtgccagagattaagatactcaataatttgggtgtcgatatcgctgctaatactgtaatctgggactacaagagagaagcaccagcacatatgtcaacaataggtgtctgcacaatgactgacattgccaagaaacctactgagagtgcttgttcctcgcttactgtcttatttgatggtagagtggaaggacaggtagacctttttagaaatgcccgtaatggtgttttaataacagaaggttcagttaaaggtttaataccttcaaagggaccagcacaagctagtgtcaatggagtcacattaattggagaatcagtaaaaacacagtttaattattttaagaaagtagatggcatcattcaacagttgcctgaaacctactttactcagagccgagacttagaggatttcaagcccagatcacaaatggaaactgactttcttgagctcgctatggatgaattcatacaacggtacaagcttgaaggctatgccttcgaacatatcgtttatggagattttagtcatggacagcttggtggacttcatctaatgattggtctagctaagcgctcacaagattcaccacttaaattagaggattttatccctacggacagtacagtgaaaaattatttcataacagatgcgcaaacaggttcatcaaaatgcgtgtgctctgttattgatcttctgcttgatgactttgttgagataataaagtcacaagatttatcagtggtttcaaaggtggtcaaagtcacaattgactatgctgaaatttcattcatgttatggtgtaaggatggacatgttgaaaccttttacccaaaattacaagcgagtcaggcgtggcaaccaggagttgcaatgcctaacttgtataagatgcagagaatgcttcttgaaaaatgtgaccttcagaattatggtgaaaatgctgtcataccaaarggaataatgatgaatgtcgcaaaatatactcaactgtgtcaatatttaaatacactyacattagcygtgccatataatatgagagttatccattttggtgctggctcrgacaaaggagttgcacccggcacagctgttctcagacagtggttgccaattggcacactacttgttgattcagatcttaacgacttcgtctctgacgctgattccactctaattggagactgtgcaaccgtacatacagctaacaaatgggatctcattattagcgatatgtatgatcctaaaaccaaacacgtgacaaaggaaaatgattcaaaagaaggatttttcacttacctgtgtggatttattaaacaaaaattagccctgggaggctctgtggctgtaaagataactgagcattcttggaatgcggatctctacaagctcatgggacatttctcatggtggacagcttttgttacaaatgttaatgcatcttcatcagaagcatttttaattggagttaactatcttggtaagccaaaagaacaaattgatggttacaccatgcatgctaactacattttctggaggaatacaaacccgattcaattgtcttcctattcactttttgacatgagtaagttccctcttaaattaaggggaacagctgtcatgtctttaaaggagaaccaaatcaatgaaatgatttattctctacttgaaaaaggcagacttatcattagggaaaacaacagagttgttgtctcaagtgatgttcttgttaataactaaacgaacatgactcgagctggtactgcatgcacgcaatgctagctgcccctttcccgtcctgggtaccccgagtctcccccgacctcgggtcccaggtatgctcccacctccacctgccccactcaccacctctgctagttccagacacctcccaagcacgcagcaatgcagctcaaaacgcttagcctagccacacccccacgggaaacagcagtgattaacctttagcaataaacgaaagtttaactaagctatactaaccccagggttggtcaatttcgtgccagccacaccctggagctagcaaaaaaaa

SEQ ID NO: 141 - DNA, 7088 bp, synthetic construct
  misc_feature 1..7088: note = Sythesized Vaccine Candidate 3
  source 1..7088: mol_type = other DNA
ctcgacattgattattgactagttattaatagtaatcaattacggggtcattagttcatagcccatatatggagttccgcgttacataacttacggtaaatggcccgcctggctgaccgcccaacgacccccgcccattgacgtcaataatgacgtatgttcccatagtaacgccaatagggactttccattgacgtcaatgggtggagtatttacggtaaactgcccacttggcagtacatcaagtgtatcatatgccaagtacgccccctattgacgtcaatgacggtaaatggcccgcctggcattatgcccagtacatgaccttatgggactttcctacttggcagtacatctacgtattagtcatcgctattaccatggtcgaggtgagccccacgttctgcttcactctccccatctcccccccctccccacccccaattttgtatttatttattttttaattattttgtgcagcgatgggggcggggggggggggggggcgcgcgccaggcggggcggggcggggcgaggggcggggcggggcgaggcggagaggtgcggcggcagccaatcagagcggcgcgctccgaaagtttccttttatggcgaggcggcggcggcggcggccctataaaaagcgaagcgcgcggcgggcgggagtcgctgcgcgctgccttcgccccgtgccccgctccgccgccgcctcgcgccgcccgccccggctctgactgaccgcgttactcccacaggtgagcgggcgggacggcccttctcctccgggctgtaattagcgcttggtttaatgacggcttgtttcttttctgtggctgcgtgaaagccttgaggggctccgggagggccctttgtgcggggggagcggctcggggggtgcgtgcgtgtgtgtgtgcgtggggagcgccgcgtgcggctccgcgctgcccggcggctgtgagcgctgcgggcgcggcgcggggctttgtgcgctccgcagtgtgcgcgaggggagcgcggccgggggcggtgccccgcggtgcggggggggctgcgaggggaacaaaggctgcgtgcggggtgtgtgcgtgggggggtgagcagggggtgtgggcgcgtcggtcgggctgcaaccccccctgcacccccctccccgagttgctgagcacggcccggcttcgggtgcggggctccgtacggggcgtggcgcggggctcgccgtgccgggcggggggtggcggcaggtgggggtgccgggcggggcggggccgcctcgggccggggagggctcgggggaggggcgcggcggcccccggagcgccggcggctgtcgaggcgcggcgagccgcagccattgccttttatggtaatcgtgcgagagggcgcagggacttcctttgtcccaaatctgtgcggagccgaaatctgggaggcgccgccgcaccccctctagcgggcgcggggcgaagcggtgcggcgccggcaggaaggaaatgggcggggagggccttcgtgcgtcgccgcgccgccgtccccttctccctctccagcctcggggctgtccgcggggggacggctgccttcgggggggacggggcagggcggggttcggcttctggcgtgtgaccggcggctctagagcctctgctaaccatgttcatgccttcttctttttcctacagctcctgggcaacgtgctggttattgtgctgtctcatcattttggcaaagaattggagaataaactagtattcttctggtccccacagactcagagagaacccgccaccatgttcgtgttcctggtgctgctgcccctggtgagcagccagtgcgtgaacctgaccaccaggacccagctgccccccgcctacaccaacagcttcaccaggggcgtgtactaccccgacaaggtgttcaggagcagcgtgctgcacagcacccaggacctgttcctgcccttcttcagcaacgtgacctggttccacgccatccacgtgagcggcaccaacggcaccaagaggttcgacaaccccgtgctgcccttcaacgacggcgtgtacttcgccagcaccgagaagagcaacatcatcaggggctggatcttcggcaccaccctggacagcaagacccagagcctgctgatcgtgaacaacgccaccaacgtggtgatcaaggtgtgcgagttccagttctgcaacgaccccttcctgggcgtgtactaccacaagaacaacaagagctggatggagagcgagttcagggtgtacagcagcgccaacaactgcaccttcgagtacgtgagccagcccttcctgatggacctggagggcaagcagggcaacttcaagaacctgagggagttcgtgttcaagaacatcgacggctacttcaagatctacagcaagcacacccccatcaacctggtgagggacctgccccagggcttcagcgccctggagcccctggtggacctgcccatcggcatcaacatcaccaggttccagaccctgctggccctgcacaggagctacctgacccccggcgacagcagcagcggctggaccgccggcgccgccgcctactacgtgggctacctgcagcccaggaccttcctgctgaagtacaacgagaacggcaccatcaccgacgccgtggactgcgccctggaccccctgagcgagaccaagtgcaccctgaagagcttcaccgtggagaagggcatctaccagaccagcaacttcagggtgcagcccaccgagagcatcgtgaggttccccaacatcaccaacctgtgccccttcggcgaggtgttcaacgccaccaggttcgccagcgtgtacgcctggaacaggaagaggatcagcaactgcgtggccgactacagcgtgctgtacaacagcgccagcttcagcaccttcaagtgctacggcgtgagccccaccaagctgaacgacctgtgcttcaccaacgtgtacgccgacagcttcgtgatcaggggcgacgaggtgaggcagatcgcccccggccagaccggcaagatcgccgactacaactacaagctgcccgacgacttcaccggctgcgtgatcgcctggaacagcaacaacctggacagcaaggtgggcggcaactacaactacctgtacaggctgttcaggaagagcaacctgaagcccttcgagagggacatcagcaccgagatctaccaggccggcagcaccccctgcaacggcgtggagggcttcaactgctacttccccctgcagagctacggcttccagcccaccaacggcgtgggctaccagccctacagggtggtggtgctgagcttcgagctgctgcacgcccccgccaccgtgtgcggccccaagaagagcaccaacctggtgaagaacaagtgcgtgaacttcaacttcaacggcctgaccggcaccggcgtgctgaccgagagcaacaagaagttcctgcccttccagcagttcggcagggacatcgccgacaccaccgacgccgtgagggacccccagaccctggagatcctggacatcaccccctgcagcttcggcggcgtgagcgtgatcacccccggcaccaacaccagcaaccaggtggccgtgctgtaccaggacgtgaactgcaccgaggtgcccgtggccatccacgccgaccagctgacccccacctggagggtgtacagcaccggcagcaacgtgttccagaccagggccggctgcctgatcggcgccgagcacgtgaacaacagctacgagtgcgacatccccatcggcgccggcatctgcgccagctaccagacccagaccaacagccccggcagcgccagcagcgtggccagccagagcatcatcgcctacaccatgagcctgggcgccgagaacagcgtggcctacagcaacaacagcatcgccatccccaccaacttcaccatcagcgtgaccaccgagatcctgcccgtgagcatgaccaagaccagcgtggactgcaccatgtacatctgcggcgacagcaccgagtgcagcaacctgctgctgcagtacggcagcttctgcacccagctgaacagggccctgaccggcatcgccgtggagcaggacaagaacacccaggaggtgttcgcccaggtgaagcagatctacaagaccccccccatcaaggacttcggcggcttcaacttcagccagatcctgcccgaccccagcaagcccagcaagaggagccccatcgaggacctgctgttcaacaaggtgaccctggccgacgccggcttcatcaagcagtacggcgactgcctgggcgacatcgccgccagggacctgatctgcgcccagaagttcaacggcctgaccgtgctgccccccctgctgaccgacgagatgatcgcccagtacaccagcgccctgctggccggcaccatcaccagcggctggaccttcggcgccggccccgccctgcagatccccttccccatgcagatggcctacaggttcaacggcatcggcgtgacccagaacgtgctgtacgagaaccagaagctgatcgccaaccagttcaacagcgccatcggcaagatccaggacagcctgagcagcacccccagcgccctgggcaagctgcaggacgtggtgaaccagaacgcccaggccctgaacaccctggtgaagcagctgagcagcaacttcggcgccatcagcagcgtgctgaacgacatcctgagcaggctggacccccccgaggccgaggtgcagatcgacaggctgatcaccggcaggctgcagagcctgcagacctacgtgacccagcagctgatcagggccgccgagatcagggccagcgccaacctggccgccaccaagatgagcgagtgcgtgctgggccagagcaagagggtggacttctgcggcaagggctaccacctgatgagcttcccccagagcgccccccacggcgtggtgttcctgcacgtgacctacgtgcccgcccaggagaagaacttcaccaccgcccccgccatctgccacgacggcaaggcccacttccccagggagggcgtgttcgtgagcaacggcacccactggttcgtgacccagaggaacttctacgagccccagatcatcaccaccgacaacaccttcgtgagcggcaactgcgacgtggtgatcggcatcgtgaacaacaccgtgtacgaccccctgcagcccgagctggacagcttcaaggaggagctggacaagtacttcaagaaccacaccagccccgacgtggacctgggcgacatcagcggcatcaacgccagcgtggtgaacatccagaaggagatcgacaggctgaacgaggtggccaagaacctgaacgagagcctgatcgacctgcaggagctgggcaagtacgagcagtacatcaagtggccctggtacatctggctgggcttcatcgccggcctgatcgccatcgtgatggtgaccatcatgctgtgctgcatgaccagctgctgcagctgcctgaagggctgctgcagctgcggcagctgctgcaagttcgacgaggacgacagcgagcccgtgctgaagggcgtgaagctgcactacaccggaagcggagccacgaacttctctctgttaaagcaagcaggagatgttgaagaaaaccccgggcctatgtacagcttcgtgagcgaggagaccggcaccctgatcgtgaacagcgtgctgctgttcctggccttcgtggtgttcctgctggtgaccctggccatcctgaccgccctgaggctgtgcgcctactgctgcaacatcgtgaacgtgagcctggtgaagcccagcttctacgtgtacagcagggtgaagaacctgaacagcagcagggtgcccgacctgctggtgggaagcggagccacgaacttctctctgttaaagcaagcaggagatgttgaagaaaaccccgggcctatggccgacagcaacggcaccatcaccgtggaggagctgaagaagctgctggagcagtggaacctggtgatcggcttcctgttcctgacctggatctgcctgctgcagttcgcctacgccaacaggaacaggttcctgtacatcatcaagctgatcttcctgtggctgctgtggcccgtgaccctggcctgcttcgtgctggccgccgtgtacaggatcaactggatcaccggcggcatcgccatcgccatggcctgcctggtgggcctgatgtggctgagctacttcatcgccagcttcaggctgttcgccaggaccaggagcatgtggagcttcaaccccgagaccaacatcctgctgaacgtgcccctgcacggcaccatcctgaccaggcccctgctggagagcgagctggtgatcggcgccgtgatcctgaggggccacctgaggatcgccggccaccacctgggcaggtgcgacatcaaggacctgcccaaggagatcaccgtggccaccagcaggaccctgagctactacaagctgggcgccagccagagggtggccggcgacagcggcttcgccgcctacagcaggtacaggatcggcaactacaagctgaacaccgaccacagcagcagcagcgacaacatcgccctgctggtgcagggaagcggagccacgaacttctctctgttaaagcaagcaggagatgttgaagaaaaccccgggcctatgaagatcatcctgttcctggccctgatcaccctggccacctgcgagctgtaccactaccaggagtgcgtgaggggcaccaccgtgtgactcgagctggtactgcatgcacgcaatgctagctgcccctttcccgtcctgggtaccccgagtctcccccgacctcgggtcccaggtatgctcccacctccacctgccccactcaccacctctgctagttccagacacctcccaagcacgcagcaatgcagctcaaaacgcttagcctagccacacccccacgggaaacagcagtgattaacctttagcaataaacgaaagtttaactaagctatactaaccccagggttggtcaatttcgtgccagccacaccctggagctagcaaaaaaaa

SEQ ID NO: 142 - DNA, 6935 bp, synthetic construct
  misc_feature 1..6935: note = Synthesized Vaccine Candidate 4
  source 1..6935: mol_type = other DNA
ctcgacattgattattgactagttattaatagtaatcaattacggggtcattagttcatagcccatatatggagttccgcgttacataacttacggtaaatggcccgcctggctgaccgcccaacgacccccgcccattgacgtcaataatgacgtatgttcccatagtaacgccaatagggactttccattgacgtcaatgggtggagtatttacggtaaactgcccacttggcagtacatcaagtgtatcatatgccaagtacgccccctattgacgtcaatgacggtaaatggcccgcctggcattatgcccagtacatgaccttatgggactttcctacttggcagtacatctacgtattagtcatcgctattaccatggtcgaggtgagccccacgttctgcttcactctccccatctcccccccctccccacccccaattttgtatttatttattttttaattattttgtgcagcgatgggggcggggggggggggggggcgcgcgccaggcggggcggggcggggcgaggggcggggcggggcgaggcggagaggtgcggcggcagccaatcagagcggcgcgctccgaaagtttccttttatggcgaggcggcggcggcggcggccctataaaaagcgaagcgcgcggcgggcgggagtcgctgcgcgctgccttcgccccgtgccccgctccgccgccgcctcgcgccgcccgccccggctctgactgaccgcgttactcccacaggtgagcgggcgggacggcccttctcctccgggctgtaattagcgcttggtttaatgacggcttgtttcttttctgtggctgcgtgaaagccttgaggggctccgggagggccctttgtgcggggggagcggctcggggggtgcgtgcgtgtgtgtgtgcgtggggagcgccgcgtgcggctccgcgctgcccggcggctgtgagcgctgcgggcgcggcgcggggctttgtgcgctccgcagtgtgcgcgaggggagcgcggccgggggcggtgccccgcggtgcggggggggctgcgaggggaacaaaggctgcgtgcggggtgtgtgcgtgggggggtgagcagggggtgtgggcgcgtcggtcgggctgcaaccccccctgcacccccctccccgagttgctgagcacggcccggcttcgggtgcggggctccgtacggggcgtggcgcggggctcgccgtgccgggcggggggtggcggcaggtgggggtgccgggcggggcggggccgcctcgggccggggagggctcgggggaggggcgcggcggcccccggagcgccggcggctgtcgaggcgcggcgagccgcagccattgccttttatggtaatcgtgcgagagggcgcagggacttcctttgtcccaaatctgtgcggagccgaaatctgggaggcgccgccgcaccccctctagcgggcgcggggcgaagcggtgcggcgccggcaggaaggaaatgggcggggagggccttcgtgcgtcgccgcgccgccgtccccttctccctctccagcctcggggctgtccgcggggggacggctgccttcgggggggacggggcagggcggggttcggcttctggcgtgtgaccggcggctctagagcctctgctaaccatgttcatgccttcttctttttcctacagctcctgggcaacgtgctggttattgtgctgtctcatcattttggcaaagaattggagaataaactagtattcttctggtccccacagactcagagagaacccgccaccatgttcgtgttcctggtgctgctgcccctggtgagcagccagtgcgtgaacctgaccaccaggacccagctgccccccgcctacaccaacagcttcaccaggggcgtgtactaccccgacaaggtgttcaggagcagcgtgctgcacagcacccaggacctgttcctgcccttcttcagcaacgtgacctggttccacgccatccacgtgagcggcaccaacggcaccaagaggttcgacaaccccgtgctgcccttcaacgacggcgtgtacttcgccagcaccgagaagagcaacatcatcaggggctggatcttcggcaccaccctggacagcaagacccagagcctgctgatcgtgaacaacgccaccaacgtggtgatcaaggtgtgcgagttccagttctgcaacgaccccttcctgggcgtgtactaccacaagaacaacaagagctggatggagagcgagttcagggtgtacagcagcgccaacaactgcaccttcgagtacgtgagccagcccttcctgatggacctggagggcaagcagggcaacttcaagaacctgagggagttcgtgttcaagaacatcgacggctacttcaagatctacagcaagcacacccccatcaacctggtgagggacctgccccagggcttcagcgccctggagcccctggtggacctgcccatcggcatcaacatcaccaggttccagaccctgctggccctgcacaggagctacctgacccccggcgacagcagcagcggctggaccgccggcgccgccgcctactacgtgggctacctgcagcccaggaccttcctgctgaagtacaacgagaacggcaccatcaccgacgccgtggactgcgccctggaccccctgagcgagaccaagtgcaccctgaagagcttcaccgtggagaagggcatctaccagaccagcaacttcagggtgcagcccaccgagagcatcgtgaggttccccaacatcaccaacctgtgccccttcggcgaggtgttcaacgccaccaggttcgccagcgtgtacgcctggaacaggaagaggatcagcaactgcgtggccgactacagcgtgctgtacaacagcgccagcttcagcaccttcaagtgctacggcgtgagccccaccaagctgaacgacctgtgcttcaccaacgtgtacgccgacagcttcgtgatcaggggcgacgaggtgaggcagatcgcccccggccagaccggcaagatcgccgactacaactacaagctgcccgacgacttcaccggctgcgtgatcgcctggaacagcaacaacctggacagcaaggtgggcggcaactacaactacctgtacaggctgttcaggaagagcaacctgaagcccttcgagagggacatcagcaccgagatctaccaggccggcagcaccccctgcaacggcgtggagggcttcaactgctacttccccctgcagagctacggcttccagcccaccaacggcgtgggctaccagccctacagggtggtggtgctgagcttcgagctgctgcacgcccccgccaccgtgtgcggccccaagaagagcaccaacctggtgaagaacaagtgcgtgaacttcaacttcaacggcctgaccggcaccggcgtgctgaccgagagcaacaagaagttcctgcccttccagcagttcggcagggacatcgccgacaccaccgacgccgtgagggacccccagaccctggagatcctggacatcaccccctgcagcttcggcggcgtgagcgtgatcacccccggcaccaacaccagcaaccaggtggccgtgctgtaccaggacgtgaactgcaccgaggtgcccgtggccatccacgccgaccagctgacccccacctggagggtgtacagcaccggcagcaacgtgttccagaccagggccggctgcctgatcggcgccgagcacgtgaacaacagctacgagtgcgacatccccatcggcgccggcatctgcgccagctaccagacccagaccaacagccccggcagcgccagcagcgtggccagccagagcatcatcgcctacaccatgagcctgggcgccgagaacagcgtggcctacagcaacaacagcatcgccatccccaccaacttcaccatcagcgtgaccaccgagatcctgcccgtgagcatgaccaagaccagcgtggactgcaccatgtacatctgcggcgacagcaccgagtgcagcaacctgctgctgcagtacggcagcttctgcacccagctgaacagggccctgaccggcatcgccgtggagcaggacaagaacacccaggaggtgttcgcccaggtgaagcagatctacaagaccccccccatcaaggacttcggcggcttcaacttcagccagatcctgcccgaccccagcaagcccagcaagaggagccccatcgaggacctgctgttcaacaaggtgaccctggccgacgccggcttcatcaagcagtacggcgactgcctgggcgacatcgccgccagggacctgatctgcgcccagaagttcaacggcctgaccgtgctgccccccctgctgaccgacgagatgatcgcccagtacaccagcgccctgctggccggcaccatcaccagcggctggaccttcggcgccggccccgccctgcagatccccttccccatgcagatggcctacaggttcaacggcatcggcgtgacccagaacgtgctgtacgagaaccagaagctgatcgccaaccagttcaacagcgccatcggcaagatccaggacagcctgagcagcacccccagcgccctgggcaagctgcaggacgtggtgaaccagaacgcccaggccctgaacaccctggtgaagcagctgagcagcaacttcggcgccatcagcagcgtgctgaacgacatcctgagcaggctggacccccccgaggccgaggtgcagatcgacaggctgatcaccggcaggctgcagagcctgcagacctacgtgacccagcagctgatcagggccgccgagatcagggccagcgccaacctggccgccaccaagatgagcgagtgcgtgctgggccagagcaagagggtggacttctgcggcaagggctaccacctgatgagcttcccccagagcgccccccacggcgtggtgttcctgcacgtgacctacgtgcccgcccaggagaagaacttcaccaccgcccccgccatctgccacgacggcaaggcccacttccccagggagggcgtgttcgtgagcaacggcacccactggttcgtgacccagaggaacttctacgagccccagatcatcaccaccgacaacaccttcgtgagcggcaactgcgacgtggtgatcggcatcgtgaacaacaccgtgtacgaccccctgcagcccgagctggacagcttcaaggaggagctggacaagtacttcaagaaccacaccagccccgacgtggacctgggcgacatcagcggcatcaacgccagcgtggtgaacatccagaaggagatcgacaggctgaacgaggtggccaagaacctgaacgagagcctgatcgacctgcaggagctgggcaagtacgagcagtacatcaagtggccctggtacatctggctgggcttcatcgccggcctgatcgccatcgtgatggtgaccatcatgctgtgctgcatgaccagctgctgcagctgcctgaagggctgctgcagctgcggcagctgctgcaagttcgacgaggacgacagcgagcccgtgctgaagggcgtgaagctgcactacaccggaagcggagccacgaacttctctctgttaaagcaagcaggagatgttgaagaaaaccccgggcctatggccgacagcaacggcaccatcaccgtggaggagctgaagaagctgctggagcagtggaacctggtgatcggcttcctgttcctgacctggatctgcctgctgcagttcgcctacgccaacaggaacaggttcctgtacatcatcaagctgatcttcctgtggctgctgtggcccgtgaccctggcctgcttcgtgctggccgccgtgtacaggatcaactggatcaccggcggcatcgccatcgccatggcctgcctggtgggcctgatgtggctgagctacttcatcgccagcttcaggctgttcgccaggaccaggagcatgtggagcttcaaccccgagaccaacatcctgctgaacgtgcccctgcacggcaccatcctgaccaggcccctgctggagagcgagctggtgatcggcgccgtgatcctgaggggccacctgaggatcgccggccaccacctgggcaggtgcgacatcaaggacctgcccaaggagatcaccgtggccaccagcaggaccctgagctactacaagctgggcgccagccagagggtggccggcgacagcggcttcgccgcctacagcaggtacaggatcggcaactacaagctgaacaccgaccacagcagcagcagcgacaacatcgccctgctggtgcagggaagcggagccacgaacttctctctgttaaagcaagcaggagatgttgaagaaaaccccgggcctatgtacagcttcgtgagcgaggagaccggcaccctgatcgtgaacagcgtgctgctgttcctggccttcgtggtgttcctgctggtgaccctggccatcctgaccgccctgaggctgtgcgcctactgctgcaacatcgtgaacgtgagcctggtgaagcccagcttctacgtgtacagcagggtgaagaacctgaacagcagcagggtgcccgacctgctggtgtgactcgagctggtactgcatgcacgcaatgctagctgcccctttcccgtcctgggtaccccgagtctcccccgacctcgggtcccaggtatgctcccacctccacctgccccactcaccacctctgctagttccagacacctcccaagcacgcagcaatgcagctcaaaacgcttagcctagccacacccccacgggaaacagcagtgattaacctttagcaataaacgaaagtttaactaagctatactaaccccagggttggtcaatttcgtgccagccacaccctggagctagcaaaaaaaa

SEQ ID NO: 143 - DNA, 12110 bp, synthetic construct
  misc_feature 1..12110: note = Synthesized Vaccine Candidate 5
  source 1..12110: mol_type = other DNA
ctcgacattgattattgactagttattaatagtaatcaattacggggtcattagttcatagcccatatatggagttccgcgttacataacttacggtaaatggcccgcctggctgaccgcccaacgacccccgcccattgacgtcaataatgacgtatgttcccatagtaacgccaatagggactttccattgacgtcaatgggtggagtatttacggtaaactgcccacttggcagtacatcaagtgtatcatatgccaagtacgccccctattgacgtcaatgacggtaaatggcccgcctggcattatgcccagtacatgaccttatgggactttcctacttggcagtacatctacgtattagtcatcgctattaccatggtcgaggtgagccccacgttctgcttcactctccccatctcccccccctccccacccccaattttgtatttatttattttttaattattttgtgcagcgatgggggcggggggggggggggggcgcgcgccaggcggggcggggcggggcgaggggcggggcggggcgaggcggagaggtgcggcggcagccaatcagagcggcgcgctccgaaagtttccttttatggcgaggcggcggcggcggcggccctataaaaagcgaagcgcgcggcgggcgggagtcgctgcgcgctgccttcgccccgtgccccgctccgccgccgcctcgcgccgcccgccccggctctgactgaccgcgttactcccacaggtgagcgggcgggacggcccttctcctccgggctgtaattagcgcttggtttaatgacggcttgtttcttttctgtggctgcgtgaaagccttgaggggctccgggagggccctttgtgcggggggagcggctcggggggtgcgtgcgtgtgtgtgtgcgtggggagcgccgcgtgcggctccgcgctgcccggcggctgtgagcgctgcgggcgcggcgcggggctttgtgcgctccgcagtgtgcgcgaggggagcgcggccgggggcggtgccccgcggtgcggggggggctgcgaggggaacaaaggctgcgtgcggggtgtgtgcgtgggggggtgagcagggggtgtgggcgcgtcggtcgggctgcaaccccccctgcacccccctccccgagttgctgagcacggcccggcttcgggtgcggggctccgtacggggcgtggcgcggggctcgccgtgccgggcggggggtggcggcaggtgggggtgccgggcggggcggggccgcctcgggccggggagggctcgggggaggggcgcggcggcccccggagcgccggcggctgtcgaggcgcggcgagccgcagccattgccttttatggtaatcgtgcgagagggcgcagggacttcctttgtcccaaatctgtgcggagccgaaatctgggaggcgccgccgcaccccctctagcgggcgcggggcgaagcggtgcggcgccggcaggaaggaaatgggcggggagggccttcgtgcgtcgccgcgccgccgtccccttctccctctccagcctcggggctgtccgcggggggacggctgccttcgggggggacggggcagggcggggttcggcttctggcgtgtgaccggcggctctagagcctctgctaaccatgttcatgccttcttctttttcctacagctcctgggcaacgtgctggttattgtgctgtctcatcattttggcaaagaattggagaataaactagtattcttctggtccccacagactcagagagaacccgccaccatgttcgtgttcctggtgctgctgcccctggtgagcagccagtgcgtgaacctgaccaccaggacccagctgccccccgcctacaccaacagcttcaccaggggcgtgtactaccccgacaaggtgttcaggagcagcgtgctgcacagcacccaggacctgttcctgcccttcttcagcaacgtgacctggttccacgccatccacgtgagcggcaccaacggcaccaagaggttcgacaaccccgtgctgcccttcaacgacggcgtgtacttcgccagcaccgagaagagcaacatcatcaggggctggatcttcggcaccaccctggacagcaagacccagagcctgctgatcgtgaacaacgccaccaacgtggtgatcaaggtgtgcgagttccagttctgcaacgaccccttcctgggcgtgtactaccacaagaacaacaagagctggatggagagcgagttcagggtgtacagcagcgccaacaactgcaccttcgagtacgtgagccagcccttcctgatggacctggagggcaagcagggcaacttcaagaacctgagggagttcgtgttcaagaacatcgacggctacttcaagatctacagcaagcacacccccatcaacctggtgagggacctgccccagggcttcagcgccctggagcccctggtggacctgcccatcggcatcaacatcaccaggttccagaccctgctggccctgcacaggagctacctgacccccggcgacagcagcagcggctggaccgccggcgccgccgcctactacgtgggctacctgcagcccaggaccttcctgctgaagtacaacgagaacggcaccatcaccgacgccgtggactgcgccctggaccccctgagcgagaccaagtgcaccctgaagagcttcaccgtggagaagggcatctaccagaccagcaacttcagggtgcagcccaccgagagcatcgtgaggttccccaacatcaccaacctgtgccccttcggcgaggtgttcaacgccaccaggttcgccagcgtgtacgcctggaacaggaagaggatcagcaactgcgtggccgactacagcgtgctgtacaacagcgccagcttcagcaccttcaagtgctacggcgtgagccccaccaagctgaacgacctgtgcttcaccaacgtgtacgccgacagcttcgtgatcaggggcgacgaggtgaggcagatcgcccccggccagaccggcaagatcgccgactacaactacaagctgcccgacgacttcaccggctgcgtgatcgcctggaacagcaacaacctggacagcaaggtgggcggcaactacaactacctgtacaggctgttcaggaagagcaacctgaagcccttcgagagggacatcagcaccgagatctaccaggccggcagcaccccctgcaacggcgtggagggcttcaactgctacttccccctgcagagctacggcttccagcccaccaacggcgtgggctaccagccctacagggtggtggtgctgagcttcgagctgctgcacgcccccgccaccgtgtgcggccccaagaagagcaccaacctggtgaagaacaagtgcgtgaacttcaacttcaacggcctgaccggcaccggcgtgctgaccgagagcaacaagaagttcctgcccttccagcagttcggcagggacatcgccgacaccaccgacgccgtgagggacccccagaccctggagatcctggacatcaccccctgcagcttcggcggcgtgagcgtgatcacccccggcaccaacaccagcaaccaggtggccgtgctgtaccaggacgtgaactgcaccgaggtgcccgtggccatccacgccgaccagctgacccccacctggagggtgtacagcaccggcagcaacgtgttccagaccagggccggctgcctgatcggcgccgagcacgtgaacaacagctacgagtgcgacatccccatcggcgccggcatctgcgccagctaccagacccagaccaacagccccggcagcgccagcagcgtggccagccagagcatcatcgcctacaccatgagcctgggcgccgagaacagcgtggcctacagcaacaacagcatcgccatccccaccaacttcaccatcagcgtgaccaccgagatcctgcccgtgagcatgaccaagaccagcgtggactgcaccatgtacatctgcggcgacagcaccgagtgcagcaacctgctgctgcagtacggcagcttctgcacccagctgaacagggccctgaccggcatcgccgtggagcaggacaagaacacccaggaggtgttcgcccaggtgaagcagatctacaagaccccccccatcaaggacttcggcggcttcaacttcagccagatcctgcccgaccccagcaagcccagcaagaggagccccatcgaggacctgctgttcaacaaggtgaccctggccgacgccggcttcatcaagcagtacggcgactgcctgggcgacatcgccgccagggacctgatctgcgcccagaagttcaacggcctgaccgtgctgccccccctgctgaccgacgagatgatcgcccagtacaccagcgccctgctggccggcaccatcaccagcggctggaccttcggcgccggccccgccctgcagatccccttccccatgcagatggcctacaggttcaacggcatcggcgtgacccagaacgtgctgtacgagaaccagaagctgatcgccaaccagttcaacagcgccatcggcaagatccaggacagcctgagcagcacccccagcgccctgggcaagctgcaggacgtggtgaaccagaacgcccaggccctgaacaccctggtgaagcagctgagcagcaacttcggcgccatcagcagcgtgctgaacgacatcctgagcaggctggacccccccgaggccgaggtgcagatcgacaggctgatcaccggcaggctgcagagcctgcagacctacgtgacccagcagctgatcagggccgccgagatcagggccagcgccaacctggccgccaccaagatgagcgagtgcgtgctgggccagagcaagagggtggacttctgcggcaagggctaccacctgatgagcttcccccagagcgccccccacggcgtggtgttcctgcacgtgacctacgtgcccgcccaggagaagaacttcaccaccgcccccgccatctgccacgacggcaaggcccacttccccagggagggcgtgttcgtgagcaacggcacccactggttcgtgacccagaggaacttctacgagccccagatcatcaccaccgacaacaccttcgtgagcggcaactgcgacgtggtgatcggcatcgtgaacaacaccgtgtacgaccccctgcagcccgagctggacagcttcaaggaggagctggacaagtacttcaagaaccacaccagccccgacgtggacctgggcgacatcagcggcatcaacgccagcgtggtgaacatccagaaggagatcgacaggctgaacgaggtggccaagaacctgaacgagagcctgatcgacctgcaggagctgggcaagtacgagcagtacatcaagtggccctggtacatctggctgggcttcatcgccggcctgatcgccatcgtgatggtgaccatcatgctgtgctgcatgaccagctgctgcagctgcctgaagggctgctgcagctgcggcagctgctgcaagttcgacgaggacgacagcgagcccgtgctgaagggcgtgaagctgcactacaccggaagcggagccacgaacttctctctgttaaagcaagcaggagatgttgaagaaaaccccgggcctgcccccaccaaggtgaccttcggcgacgacaccgtgatcgaggtgcagggctacaagagcgtgaacatcaccttcgagctggacgagaggatcgacaaggtgctgaacgagaagtgcagcgcctacaccgtggagctgggcaccgaggtgaacgagttcgcctgcgtggtggccgacgccgtgatcaagaccctgcagcccgtgagcgagctgctgacccccctgggcatcgacctggacgagtggagcatggccacctactacctgttcgacgagagcggcgagttcaagctggccagccacatgtactgcagcttctacccccccgacgaggacgaggaggagggcgactgcgaggaggaggagttcgagcccagcacccagtacgagtacggcaccgaggacgactaccagggcaagcccctggagttcggcgccaccagcgccgccctgcagcccgaggaggagcaggaggaggactggctggacgacgacagccagcagaccgtgggccagcaggacggcagcgaggacaaccagaccaccaccatccagaccatcgtggaggtgcagccccagctggagatggagctgacccccgtggtgcagaccatcgaggtgaacagcttcagcggctacctgaagctgaccgacaacgtgtacatcaagaacgccgacatcgtggaggaggccaagaaggtgaagcccaccgtggtggtgaacgccgccaacgtgtacctgaagcacggcggcggcgtggccggcgccctgaacaaggccaccaacaacgccatgcaggtggagagcgacgactacatcgccaccaacggccccctgaaggtgggcggcagctgcgtgctgagcggccacaacctggccaagcactgcctgcacgtggtgggccccaacgtgaacaagggcgaggacatccagctgctgaagagcgcctacgagaacttcaaccagcacgaggtgctgctggcccccctgctgagcgccggcatcttcggcgccgaccccatccacagcctgagggtgtgcgtggacaccgtgaggaccaacgtgtacctggccgtgttcgacaagaacctgtacgacaagctggtgagcagcttcctggagatgaagagcgagaagcaggtggagcagaagatcgccgagatccccaaggaggaggtgaagcccttcatcaccgagagcaagcccagcgtggagcagaggaagcaggacgacaagaagatcaaggcctgcgtggaggaggtgaccaccaccctggaggagaccaagttcctgaccgagaacctgctgctgtacatcgacatcaacggcaacctgcaccccgacagcgccaccctggtgagcgacatcgacatcaccttcctgaagaaggacgccccctacatcgtgggcgacgtggtgcaggagggcgtgctgaccgccgtggtgatccccaccaagaaggccggcggcaccaccgagatgctggccaaggccctgaggaaggtgcccaccgacaactacatcaccacctaccccggccagggcctgaacggctacaccgtggaggaggccaagaccgtgctgaagaagtgcaagagcgccttctacatcctgcccagcatcatcagcaacgagaagcaggagatcctgggcaccgtgagctggaacctgagggagatgctggcccacgccgaggagaccaggaagctgatgcccgtgtgcgtggagaccaaggccatcgtgagcaccatccagaggaagtacaagggcatcaagatccaggagggcgtggtggactacggcgccaggttctacttctacaccagcaagaccaccgtggccagcctgatcaacaccctgaacgacctgaacgagaccctggtgaccatgcccctgggctacgtgacccacggcctgaacctggaggaggccgccaggtacatgaggagcctgaaggtgcccgccaccgtgagcgtgagcagccccgacgccgtgaccgcctacaacggctacctgaccagcagcagcaagacccccgaggagcacttcatcgagaccatcagcctggccggcagctacaaggactggagctacagcggccagagcacccagctgggcatcgagttcctgaagaggggcgacaagagcgtgtactacaccagcaaccccaccaccttccacctggacggcgaggtgatcaccttcgacaacctgaagaccctgctgagcctgagggaggtgaggaccatcaaggtgttcaccaccgtggacaacatcaacctgcacggaagcggagccacgaacttctctctgttaaagcaagcaggagatgttgaagaaaaccccgggcctagcggcttcaggaagatggccttccccagcggcaaggtggagggctgcatggtgcaggtgacctgcggcaccaccaccctgaacggcctgtggctggacgacgtggtgtactgccccaggcacgtgatctgcaccagcgaggacatgctgaaccccaactacgaggacctgctgatcaggaagagcaaccacaacttcctggtgcaggccggcaacgtgcagctgagggtgatcggccacagcatgcagaactgcgtgctgaagctgaaggtggacaccgccaaccccaagacccccaagtacaagttcgtgaggatccagcccggccagaccttcagcgtgctggcctgctacaacggcagccccagcggcgtgtaccagtgcgccatgaggcccaacttcaccatcaagggcagcttcctgaacggcagctgcggcagcgtgggcttcaacatcgactacgactgcgtgagcttctgctacatgcaccacatggagctgcccaccggcgtgcacgccggcaccgacctggagggcaacttctacggccccttcgtggacaggcagaccgcccaggccgccggcaccgacaccaccatcaccgtgaacgtgctggcctggctgtacgccgccgtgatcaacggcgacaggtggttcctgaacaggttcaccaccaccctgaacgacttcaacctggtggccatgaagtacaactacgagcccctgacccaggaccacgtggacatcctgggccccctgagcgcccagaccggcatcgccgtgctggacatgtgcgccagcctgaaggagctgctgcagaacggcatgaacggcaggaccatcctgggcagcgccctgctggaggacgagttcacccccttcgacgtggtgaggcagtgcagcggcgtgaccttccagggaagcggagccacgaacttctctctgttaaagcaagcaggagatgttgaagaaaaccccgggcctagcgccgacgcccagagcttcctgaacagggtgtgcggcgtgagcgccgccaggctgaccccctgcggcaccggcaccagcaccgacgtggtgtacagggccttcgacatctacaacgacaaggtggccggcttcgccaagttcctgaagaccaactgctgcaggttccaggagaaggacgaggacgacaacctgatcgacagctacttcgtggtgaagaggcacaccttcagcaactaccagcacgaggagaccatctacaacctgctgaaggactgccccgccgtggccaagcacgacttcttcaagttcaggatcgacggcgacatggtgccccacatcagcaggcagaggctgaccaagtacaccatggccgacctggtgtacgccctgaggcacttcgacgagggcaactgcgacaccctgaaggagatcctggtgacctacaactgctgcgacgacgactacttcaacaagaaggactggtacgacttcgtggagaaccccgacatcctgagggtgtacgccaacctgggcgagagggtgaggcaggccctgctgaagaccgtgcagttctgcgacgccatgaggaacgccggcatcgtgggcgtgctgaccctggacaaccaggacctgaacggcaactggtacgacttcggcgacttcatccagaccacccccggcagcggcgtgcccgtggtggacagctactacagcctgctgatgcccatcctgaccctgaccagggccctgaccgccgagagccacgtggacaccgacctgaccaagccctacatcaagtgggacctgctgaagtacgacttcaccgaggagaggctgaagctgttcgacaggtacttcaagtactgggaccagacctaccaccccaactgcgtgaactgcctggacgacaggtgcatcctgcactgcgccaacttcaacgtgctgttcagcaccgtgttcccccccaccagcttcggccccctggtgaggaagatcttcgtggacggcgtgcccttcgtggtgagcaccggctaccacttcagggagctgggcgtggtgcacaaccaggacgtgaacctgcacagcagcaggctgagcttcaaggagctgctggtgtacgccgccgaccccgccatgcacgccgccagcggcaacctgctgctggacaagaggaccacctgcttcagcgtggccgccctgaccaacaacgtggccttccagaccgtgaagcccggcaacttcaacaaggacttctacgacttcgccgtgagcaagggcttcttcaaggagggcagcagcgtggagctgaagcacttcttcttcgcccaggacggcaacgccgccatcagcgactacgactactacaggtacaacctgcccaccatgtgcgacatcaggcagctgctgttcgtggtggaggtggtggacaagtacttcgactgctacgacggcggctgcatcaacgccaaccaggtgatcgtgaacaacctggacaagagcgccggcttccccttcaacaagtggggcaaggccaggctgtactacgacagcatgagctacgaggaccaggacgccctgttcgcctacaccaagaggaacgtgatccccaccatcacccagatgaacctgaagtacgccatcagcgccaagaacagggccaggaccgtggccggcgtgagcatctgcagcaccatgaccaacaggcagttccaccagaagctgctgaagagcatcgccgccaccaggggcgccaccgtggtgatcggcaccagcaagttctacggcggctggcacaacatgctgaagaccgtgtacagcgacgtggagaacccccacctgatgggctgggactaccccaagtgcgacagggccatgcccaacatgctgaggatcatggccagcctggtgctggccaggaagcacaccacctgctgcagcctgagccacaggttctacaggctggccaacgagtgcgcccaggtgctgagcgagatggtgatgtgcggcggcagcctgtacgtgaagcccggcggcaccagcagcggcgacgccaccaccgcctacgccaacagcgtgttcaacatctgccaggccgtgaccgccaacgtgaacgccctgctgagcaccgacggcaacaagatcgccgacaagtacgtgaggaacctgcagcacaggctgtacgagtgcctgtacaggaacagggacgtggacaccgacttcgtgaacgagttctacgcctacctgaggaagcacttcagcatgatgatcctgagcgacgacgccgtggtgtgcttcaacagcacctacgccagccagggcctggtggccagcatcaagaacttcaagagcgtgctgtactaccagaacaacgtgttcatgagcgaggccaagtgctggaccgagaccgacctgaccaagggcccccacgagttctgcagccagcacaccatgctggtgaagcagggcgacgactacgtgtacctgccctaccccgaccccagcaggatcctgggcgccggctgcttcgtggacgacatcgtgaagaccgacggcaccctgatgatcgagaggttcgtgagcctggccatcgacgcctaccccctgaccaagcaccccaaccaggagtacgccgacgtgttccacctgtacctgcagtacatcaggaagctgcacgacgagctgaccggccacatgctggacatgtacagcgtgatgctgaccaacgacaacaccagcaggtactgggagcccgagttctacgaggccatgtacaccccccacaccgtgctgcagtgactcgagctggtactgcatgcacgcaatgctagctgcccctttcccgtcctgggtaccccgagtctcccccgacctcgggtcccaggtatgctcccacctccacctgccccactcaccacctctgctagttccagacacctcccaagcacgcagcaatgcagctcaaaacgcttagcctagccacacccccacgggaaacagcagtgattaacctttagcaataaacgaaagtttaactaagctatactaaccccagggttggtcaatttcgtgccagccacaccctggagctagcaaaaaaaa

SEQ ID NO: 144 - DNA, 8264 bp, synthetic construct
  misc_feature 1..8264: note = Synthesized Vaccine Candidate 6
  source 1..8264: mol_type = other DNA
ctcgacattgattattgactagttattaatagtaatcaattacggggtcattagttcatagcccatatatggagttccgcgttacataacttacggtaaatggcccgcctggctgaccgcccaacgacccccgcccattgacgtcaataatgacgtatgttcccatagtaacgccaatagggactttccattgacgtcaatgggtggagtatttacggtaaactgcccacttggcagtacatcaagtgtatcatatgccaagtacgccccctattgacgtcaatgacggtaaatggcccgcctggcattatgcccagtacatgaccttatgggactttcctacttggcagtacatctacgtattagtcatcgctattaccatggtcgaggtgagccccacgttctgcttcactctccccatctcccccccctccccacccccaattttgtatttatttattttttaattattttgtgcagcgatgggggcggggggggggggggggcgcgcgccaggcggggcggggcggggcgaggggcggggcggggcgaggcggagaggtgcggcggcagccaatcagagcggcgcgctccgaaagtttccttttatggcgaggcggcggcggcggcggccctataaaaagcgaagcgcgcggcgggcgggagtcgctgcgcgctgccttcgccccgtgccccgctccgccgccgcctcgcgccgcccgccccggctctgactgaccgcgttactcccacaggtgagcgggcgggacggcccttctcctccgggctgtaattagcgcttggtttaatgacggcttgtttcttttctgtggctgcgtgaaagccttgaggggctccgggagggccctttgtgcggggggagcggctcggggggtgcgtgcgtgtgtgtgtgcgtggggagcgccgcgtgcggctccgcgctgcccggcggctgtgagcgctgcgggcgcggcgcggggctttgtgcgctccgcagtgtgcgcgaggggagcgcggccgggggcggtgccccgcggtgcggggggggctgcgaggggaacaaaggctgcgtgcggggtgtgtgcgtgggggggtgagcagggggtgtgggcgcgtcggtcgggctgcaaccccccctgcacccccctccccgagttgctgagcacggcccggcttcgggtgcggggctccgtacggggcgtggcgcggggctcgccgtgccgggcggggggtggcggcaggtgggggtgccgggcggggcggggccgcctcgggccggggagggctcgggggaggggcgcggcggcccccggagcgccggcggctgtcgaggcgcggcgagccgcagccattgccttttatggtaatcgtgcgagagggcgcagggacttcctttgtcccaaatctgtgcggagccgaaatctgggaggcgccgccgcaccccctctagcgggcgcggggcgaagcggtgcggcgccggcaggaaggaaatgggcggggagggccttcgtgcgtcgccgcgccgccgtccccttctccctctccagcctcggggctgtccgcggggggacggctgccttcgggggggacggggcagggcggggttcggcttctggcgtgtgaccggcggctctagagcctctgctaaccatgttcatgccttcttctttttcctacagctcctgggcaacgtgctggttattgtgctgtctcatcattttggcaaagaattggagaataaactagtattcttctggtccccacagactcagagagaacccgccaccatgttcgtgttcctggtgctgctgcccctggtgagcagccagtgcgtgaacctgaccaccaggacccagctgccccccgcctacaccaacagcttcaccaggggcgtgtactaccccgacaaggtgttcaggagcagcgtgctgcacagcacccaggacctgttcctgcccttcttcagcaacgtgacctggttccacgccatccacgtgagcggcaccaacggcaccaagaggttcgacaaccccgtgctgcccttcaacgacggcgtgtacttcgccagcaccgagaagagcaacatcatcaggggctggatcttcggcaccaccctggacagcaagacccagagcctgctgatcgtgaacaacgccaccaacgtggtgatcaaggtgtgcgagttccagttctgcaacgaccccttcctgggcgtgtactaccacaagaacaacaagagctggatggagagcgagttcagggtgtacagcagcgccaacaactgcaccttcgagtacgtgagccagcccttcctgatggacctggagggcaagcagggcaacttcaagaacctgagggagttcgtgttcaagaacatcgacggctacttcaagatctacagcaagcacacccccatcaacctggtgagggacctgccccagggcttcagcgccctggagcccctggtggacctgcccatcggcatcaacatcaccaggttccagaccctgctggccctgcacaggagctacctgacccccggcgacagcagcagcggctggaccgccggcgccgccgcctactacgtgggctacctgcagcccaggaccttcctgctgaagtacaacgagaacggcaccatcaccgacgccgtggactgcgccctggaccccctgagcgagaccaagtgcaccctgaagagcttcaccgtggagaagggcatctaccagaccagcaacttcagggtgcagcccaccgagagcatcgtgaggttccccaacatcaccaacctgtgccccttcggcgaggtgttcaacgccaccaggttcgccagcgtgtacgcctggaacaggaagaggatcagcaactgcgtggccgactacagcgtgctgtacaacagcgccagcttcagcaccttcaagtgctacggcgtgagccccaccaagctgaacgacctgtgcttcaccaacgtgtacgccgacagcttcgtgatcaggggcgacgaggtgaggcagatcgcccccggccagaccggcaagatcgccgactacaactacaagctgcccgacgacttcaccggctgcgtgatcgcctggaacagcaacaacctggacagcaaggtgggcggcaactacaactacctgtacaggctgttcaggaagagcaacctgaagcccttcgagagggacatcagcaccgagatctaccaggccggcagcaccccctgcaacggcgtggagggcttcaactgctacttccccctgcagagctacggcttccagcccaccaacggcgtgggctaccagccctacagggtggtggtgctgagcttcgagctgctgcacgcccccgccaccgtgtgcggccccaagaagagcaccaacctggtgaagaacaagtgcgtgaacttcaacttcaacggcctgaccggcaccggcgtgctgaccgagagcaacaagaagttcctgcccttccagcagttcggcagggacatcgccgacaccaccgacgccgtgagggacccccagaccctggagatcctggacatcaccccctgcagcttcggcggcgtgagcgtgatcacccccggcaccaacaccagcaaccaggtggccgtgctgtaccaggacgtgaactgcaccgaggtgcccgtggccatccacgccgaccagctgacccccacctggagggtgtacagcaccggcagcaacgtgttccagaccagggccggctgcctgatcggcgccgagcacgtgaacaacagctacgagtgcgacatccccatcggcgccggcatctgcgccagctaccagacccagaccaacagccccggcagcgccagcagcgtggccagccagagcatcatcgcctacaccatgagcctgggcgccgagaacagcgtggcctacagcaacaacagcatcgccatccccaccaacttcaccatcagcgtgaccaccgagatcctgcccgtgagcatgaccaagaccagcgtggactgcaccatgtacatctgcggcgacagcaccgagtgcagcaacctgctgctgcagtacggcagcttctgcacccagctgaacagggccctgaccggcatcgccgtggagcaggacaagaacacccaggaggtgttcgcccaggtgaagcagatctacaagaccccccccatcaaggacttcggcggcttcaacttcagccagatcctgcccgaccccagcaagcccagcaagaggagccccatcgaggacctgctgttcaacaaggtgaccctggccgacgccggcttcatcaagcagtacggcgactgcctgggcgacatcgccgccagggacctgatctgcgcccagaagttcaacggcctgaccgtgctgccccccctgctgaccgacgagatgatcgcccagtacaccagcgccctgctggccggcaccatcaccagcggctggaccttcggcgccggccccgccctgcagatccccttccccatgcagatggcctacaggttcaacggcatcggcgtgacccagaacgtgctgtacgagaaccagaagctgatcgccaaccagttcaacagcgccatcggcaagatccaggacagcctgagcagcacccccagcgccctgggcaagctgcaggacgtggtgaaccagaacgcccaggccctgaacaccctggtgaagcagctgagcagcaacttcggcgccatcagcagcgtgctgaacgacatcctgagcaggctggacccccccgaggccgaggtgcagatcgacaggctgatcaccggcaggctgcagagcctgcagacctacgtgacccagcagctgatcagggccgccgagatcagggccagcgccaacctggccgccaccaagatgagcgagtgcgtgctgggccagagcaagagggtggacttctgcggcaagggctaccacctgatgagcttcccccagagcgccccccacggcgtggtgttcctgcacgtgacctacgtgcccgcccaggagaagaacttcaccaccgcccccgccatctgccacgacggcaaggcccacttccccagggagggcgtgttcgtgagcaacggcacccactggttcgtgacccagaggaacttctacgagccccagatcatcaccaccgacaacaccttcgtgagcggcaactgcgacgtggtgatcggcatcgtgaacaacaccgtgtacgaccccctgcagcccgagctggacagcttcaaggaggagctggacaagtacttcaagaaccacaccagccccgacgtggacctgggcgacatcagcggcatcaacgccagcgtggtgaacatccagaaggagatcgacaggctgaacgaggtggccaagaacctgaacgagagcctgatcgacctgcaggagctgggcaagtacgagcagtacatcaagtggccctggtacatctggctgggcttcatcgccggcctgatcgccatcgtgatggtgaccatcatgctgtgctgcatgaccagctgctgcagctgcctgaagggctgctgcagctgcggcagctgctgcaagttcgacgaggacgacagcgagcccgtgctgaagggcgtgaagctgcactacaccggaagcggagccacgaacttctctctgttaaagcaagcaggagatgttgaagaaaaccccgggcctgcccccaccaaggtgaccttcggcgacgacaccgtgatcgaggtgcagggctacaagagcgtgaacatcaccttcgagctggacgagaggatcgacaaggtgctgaacgagaagtgcagcgcctacaccgtggagctgggcaccgaggtgaacgagttcgcctgcgtggtggccgacgccgtgatcaagaccctgcagcccgtgagcgagctgctgacccccctgggcatcgacctggacgagtggagcatggccacctactacctgttcgacgagagcggcgagttcaagctggccagccacatgtactgcagcttctacccccccgacgaggacgaggaggagggcgactgcgaggaggaggagttcgagcccagcacccagtacgagtacggcaccgaggacgactaccagggcaagcccctggagttcggcgccaccagcgccgccctgcagcccgaggaggagcaggaggaggactggctggacgacgacagccagcagaccgtgggccagcaggacggcagcgaggacaaccagaccaccaccatccagaccatcgtggaggtgcagccccagctggagatggagctgacccccgtggtgcagaccatcgaggtgaacagcttcagcggctacctgaagctgaccgacaacgtgtacatcaagaacgccgacatcgtggaggaggccaagaaggtgaagcccaccgtggtggtgaacgccgccaacgtgtacctgaagcacggcggcggcgtggccggcgccctgaacaaggccaccaacaacgccatgcaggtggagagcgacgactacatcgccaccaacggccccctgaaggtgggcggcagctgcgtgctgagcggccacaacctggccaagcactgcctgcacgtggtgggccccaacgtgaacaagggcgaggacatccagctgctgaagagcgcctacgagaacttcaaccagcacgaggtgctgctggcccccctgctgagcgccggcatcttcggcgccgaccccatccacagcctgagggtgtgcgtggacaccgtgaggaccaacgtgtacctggccgtgttcgacaagaacctgtacgacaagctggtgagcagcttcctggagatgaagagcgagaagcaggtggagcagaagatcgccgagatccccaaggaggaggtgaagcccttcatcaccgagagcaagcccagcgtggagcagaggaagcaggacgacaagaagatcaaggcctgcgtggaggaggtgaccaccaccctggaggagaccaagttcctgaccgagaacctgctgctgtacatcgacatcaacggcaacctgcaccccgacagcgccaccctggtgagcgacatcgacatcaccttcctgaagaaggacgccccctacatcgtgggcgacgtggtgcaggagggcgtgctgaccgccgtggtgatccccaccaagaaggccggcggcaccaccgagatgctggccaaggccctgaggaaggtgcccaccgacaactacatcaccacctaccccggccagggcctgaacggctacaccgtggaggaggccaagaccgtgctgaagaagtgcaagagcgccttctacatcctgcccagcatcatcagcaacgagaagcaggagatcctgggcaccgtgagctggaacctgagggagatgctggcccacgccgaggagaccaggaagctgatgcccgtgtgcgtggagaccaaggccatcgtgagcaccatccagaggaagtacaagggcatcaagatccaggagggcgtggtggactacggcgccaggttctacttctacaccagcaagaccaccgtggccagcctgatcaacaccctgaacgacctgaacgagaccctggtgaccatgcccctgggctacgtgacccacggcctgaacctggaggaggccgccaggtacatgaggagcctgaaggtgcccgccaccgtgagcgtgagcagccccgacgccgtgaccgcctacaacggctacctgaccagcagcagcaagacccccgaggagcacttcatcgagaccatcagcctggccggcagctacaaggactggagctacagcggccagagcacccagctgggcatcgagttcctgaagaggggcgacaagagcgtgtactacaccagcaaccccaccaccttccacctggacggcgaggtgatcaccttcgacaacctgaagaccctgctgagcctgagggaggtgaggaccatcaaggtgttcaccaccgtggacaacatcaacctgcactgactcgagctggtactgcatgcacgcaatgctagctgcccctttcccgtcctgggtaccccgagtctcccccgacctcgggtcccaggtatgctcccacctccacctgccccactcaccacctctgctagttccagacacctcccaagcacgcagcaatgcagctcaaaacgcttagcctagccacacccccacgggaaacagcagtgattaacctttagcaataaacgaaagtttaactaagctatactaaccccagggttggtcaatttcgtgccagccacaccctggagctagcaaaaaaaa

SEQ ID NO: 145 - DNA, 6896 bp, synthetic construct
  misc_feature 1..6896: note = Synthesized Vaccine Candidate 7
  source 1..6896: mol_type = other DNA
ctcgacattgattattgactagttattaatagtaatcaattacggggtcattagttcatagcccatatatggagttccgcgttacataacttacggtaaatggcccgcctggctgaccgcccaacgacccccgcccattgacgtcaataatgacgtatgttcccatagtaacgccaatagggactttccattgacgtcaatgggtggagtatttacggtaaactgcccacttggcagtacatcaagtgtatcatatgccaagtacgccccctattgacgtcaatgacggtaaatggcccgcctggcattatgcccagtacatgaccttatgggactttcctacttggcagtacatctacgtattagtcatcgctattaccatggtcgaggtgagccccacgttctgcttcactctccccatctcccccccctccccacccccaattttgtatttatttattttttaattattttgtgcagcgatgggggcggggggggggggggggcgcgcgccaggcggggcggggcggggcgaggggcggggcggggcgaggcggagaggtgcggcggcagccaatcagagcggcgcgctccgaaagtttccttttatggcgaggcggcggcggcggcggccctataaaaagcgaagcgcgcggcgggcgggagtcgctgcgcgctgccttcgccccgtgccccgctccgccgccgcctcgcgccgcccgccccggctctgactgaccgcgttactcccacaggtgagcgggcgggacggcccttctcctccgggctgtaattagcgcttggtttaatgacggcttgtttcttttctgtggctgcgtgaaagccttgaggggctccgggagggccctttgtgcggggggagcggctcggggggtgcgtgcgtgtgtgtgtgcgtggggagcgccgcgtgcggctccgcgctgcccggcggctgtgagcgctgcgggcgcggcgcggggctttgtgcgctccgcagtgtgcgcgaggggagcgcggccgggggcggtgccccgcggtgcggggggggctgcgaggggaacaaaggctgcgtgcggggtgtgtgcgtgggggggtgagcagggggtgtgggcgcgtcggtcgggctgcaaccccccctgcacccccctccccgagttgctgagcacggcccggcttcgggtgcggggctccgtacggggcgtggcgcggggctcgccgtgccgggcggggggtggcggcaggtgggggtgccgggcggggcggggccgcctcgggccggggagggctcgggggaggggcgcggcggcccccggagcgccggcggctgtcgaggcgcggcgagccgcagccattgccttttatggtaatcgtgcgagagggcgcagggacttcctttgtcccaaatctgtgcggagccgaaatctgggaggcgccgccgcaccccctctagcgggcgcggggcgaagcggtgcggcgccggcaggaaggaaatgggcggggagggccttcgtgcgtcgccgcgccgccgtccccttctccctctccagcctcggggctgtccgcggggggacggctgccttcgggggggacggggcagggcggggttcggcttctggcgtgtgaccggcggctctagagcctctgctaaccatgttcatgccttcttctttttcctacagctcctgggcaacgtgctggttattgtgctgtctcatcattttggcaaagaattggagaataaactagtattcttctggtccccacagactcagagagaacccgccaccatgttcgtgttcctggtgctgctgcccctggtgagcagccagtgcgtgaacctgaccaccaggacccagctgccccccgcctacaccaacagcttcaccaggggcgtgtactaccccgacaaggtgttcaggagcagcgtgctgcacagcacccaggacctgttcctgcccttcttcagcaacgtgacctggttccacgccatccacgtgagcggcaccaacggcaccaagaggttcgacaaccccgtgctgcccttcaacgacggcgtgtacttcgccagcaccgagaagagcaacatcatcaggggctggatcttcggcaccaccctggacagcaagacccagagcctgctgatcgtgaacaacgccaccaacgtggtgatcaaggtgtgcgagttccagttctgcaacgaccccttcctgggcgtgtactaccacaagaacaacaagagctggatggagagcgagttcagggtgtacagcagcgccaacaactgcaccttcgagtacgtgagccagcccttcctgatggacctggagggcaagcagggcaacttcaagaacctgagggagttcgtgttcaagaacatcgacggctacttcaagatctacagcaagcacacccccatcaacctggtgagggacctgccccagggcttcagcgccctggagcccctggtggacctgcccatcggcatcaacatcaccaggttccagaccctgctggccctgcacaggagctacctgacccccggcgacagcagcagcggctggaccgccggcgccgccgcctactacgtgggctacctgcagcccaggaccttcctgctgaagtacaacgagaacggcaccatcaccgacgccgtggactgcgccctggaccccctgagcgagaccaagtgcaccctgaagagcttcaccgtggagaagggcatctaccagaccagcaacttcagggtgcagcccaccgagagcatcgtgaggttccccaacatcaccaacctgtgccccttcggcgaggtgttcaacgccaccaggttcgccagcgtgtacgcctggaacaggaagaggatcagcaactgcgtggccgactacagcgtgctgtacaacagcgccagcttcagcaccttcaagtgctacggcgtgagccccaccaagctgaacgacctgtgcttcaccaacgtgtacgccgacagcttcgtgatcaggggcgacgaggtgaggcagatcgcccccggccagaccggcaagatcgccgactacaactacaagctgcccgacgacttcaccggctgcgtgatcgcctggaacagcaacaacctggacagcaaggtgggcggcaactacaactacctgtacaggctgttcaggaagagcaacctgaagcccttcgagagggacatcagcaccgagatctaccaggccggcagcaccccctgcaacggcgtggagggcttcaactgctacttccccctgcagagctacggcttccagcccaccaacggcgtgggctaccagccctacagggtggtggtgctgagcttcgagctgctgcacgcccccgccaccgtgtgcggccccaagaagagcaccaacctggtgaagaacaagtgcgtgaacttcaacttcaacggcctgaccggcaccggcgtgctgaccgagagcaacaagaagttcctgcccttccagcagttcggcagggacatcgccgacaccaccgacgccgtgagggacccccagaccctggagatcctggacatcaccccctgcagcttcggcggcgtgagcgtgatcacccccggcaccaacaccagcaaccaggtggccgtgctgtaccaggacgtgaactgcaccgaggtgcccgtggccatccacgccgaccagctgacccccacctggagggtgtacagcaccggcagcaacgtgttccagaccagggccggctgcctgatcggcgccgagcacgtgaacaacagctacgagtgcgacatccccatcggcgccggcatctgcgccagctaccagacccagaccaacagccccggcagcgccagcagcgtggccagccagagcatcatcgcctacaccatgagcctgggcgccgagaacagcgtggcctacagcaacaacagcatcgccatccccaccaacttcaccatcagcgtgaccaccgagatcctgcccgtgagcatgaccaagaccagcgtggactgcaccatgtacatctgcggcgacagcaccgagtgcagcaacctgctgctgcagtacggcagcttctgcacccagctgaacagggccctgaccggcatcgccgtggagcaggacaagaacacccaggaggtgttcgcccaggtgaagcagatctacaagaccccccccatcaaggacttcggcggcttcaacttcagccagatcctgcccgaccccagcaagcccagcaagaggagccccatcgaggacctgctgttcaacaaggtgaccctggccgacgccggcttcatcaagcagtacggcgactgcctgggcgacatcgccgccagggacctgatctgcgcccagaagttcaacggcctgaccgtgctgccccccctgctgaccgacgagatgatcgcccagtacaccagcgccctgctggccggcaccatcaccagcggctggaccttcggcgccggccccgccctgcagatccccttccccatgcagatggcctacaggttcaacggcatcggcgtgacccagaacgtgctgtacgagaaccagaagctgatcgccaaccagttcaacagcgccatcggcaagatccaggacagcctgagcagcacccccagcgccctgggcaagctgcaggacgtggtgaaccagaacgcccaggccctgaacaccctggtgaagcagctgagcagcaacttcggcgccatcagcagcgtgctgaacgacatcctgagcaggctggacccccccgaggccgaggtgcagatcgacaggctgatcaccggcaggctgcagagcctgcagacctacgtgacccagcagctgatcagggccgccgagatcagggccagcgccaacctggccgccaccaagatgagcgagtgcgtgctgggccagagcaagagggtggacttctgcggcaagggctaccacctgatgagcttcccccagagcgccccccacggcgtggtgttcctgcacgtgacctacgtgcccgcccaggagaagaacttcaccaccgcccccgccatctgccacgacggcaaggcccacttccccagggagggcgtgttcgtgagcaacggcacccactggttcgtgacccagaggaacttctacgagccccagatcatcaccaccgacaacaccttcgtgagcggcaactgcgacgtggtgatcggcatcgtgaacaacaccgtgtacgaccccctgcagcccgagctggacagcttcaaggaggagctggacaagtacttcaagaaccacaccagccccgacgtggacctgggcgacatcagcggcatcaacgccagcgtggtgaacatccagaaggagatcgacaggctgaacgaggtggccaagaacctgaacgagagcctgatcgacctgcaggagctgggcaagtacgagcagtacatcaagtggccctggtacatctggctgggcttcatcgccggcctgatcgccatcgtgatggtgaccatcatgctgtgctgcatgaccagctgctgcagctgcctgaagggctgctgcagctgcggcagctgctgcaagttcgacgaggacgacagcgagcccgtgctgaagggcgtgaagctgcactacaccggaagcggagccacgaacttctctctgttaaagcaagcaggagatgttgaagaaaaccccgggcctagcggcttcaggaagatggccttccccagcggcaaggtggagggctgcatggtgcaggtgacctgcggcaccaccaccctgaacggcctgtggctggacgacgtggtgtactgccccaggcacgtgatctgcaccagcgaggacatgctgaaccccaactacgaggacctgctgatcaggaagagcaaccacaacttcctggtgcaggccggcaacgtgcagctgagggtgatcggccacagcatgcagaactgcgtgctgaagctgaaggtggacaccgccaaccccaagacccccaagtacaagttcgtgaggatccagcccggccagaccttcagcgtgctggcctgctacaacggcagccccagcggcgtgtaccagtgcgccatgaggcccaacttcaccatcaagggcagcttcctgaacggcagctgcggcagcgtgggcttcaacatcgactacgactgcgtgagcttctgctacatgcaccacatggagctgcccaccggcgtgcacgccggcaccgacctggagggcaacttctacggccccttcgtggacaggcagaccgcccaggccgccggcaccgacaccaccatcaccgtgaacgtgctggcctggctgtacgccgccgtgatcaacggcgacaggtggttcctgaacaggttcaccaccaccctgaacgacttcaacctggtggccatgaagtacaactacgagcccctgacccaggaccacgtggacatcctgggccccctgagcgcccagaccggcatcgccgtgctggacatgtgcgccagcctgaaggagctgctgcagaacggcatgaacggcaggaccatcctgggcagcgccctgctggaggacgagttcacccccttcgacgtggtgaggcagtgcagcggcgtgaccttccagtgactcgagctggtactgcatgcacgcaatgctagctgcccctttcccgtcctgggtaccccgagtctcccccgacctcgggtcccaggtatgctcccacctccacctgccccactcaccacctctgctagttccagacacctcccaagcacgcagcaatgcagctcaaaacgcttagcctagccacacccccacgggaaacagcagtgattaacctttagcaataaacgaaagtttaactaagctatactaaccccagggttggtcaatttcgtgccagccacaccctggagctagcaaaaaaaa

SEQ ID NO: 146 - DNA, 8774 bp, synthetic construct
  misc_feature 1..8774: note = Synthesized Vaccine Candidate 8
  source 1..8774: mol_type = other DNA
ctcgacattgattattgactagttattaatagtaatcaattacggggtcattagttcatagcccatatatggagttccgcgttacataacttacggtaaatggcccgcctggctgaccgcccaacgacccccgcccattgacgtcaataatgacgtatgttcccatagtaacgccaatagggactttccattgacgtcaatgggtggagtatttacggtaaactgcccacttggcagtacatcaagtgtatcatatgccaagtacgccccctattgacgtcaatgacggtaaatggcccgcctggcattatgcccagtacatgaccttatgggactttcctacttggcagtacatctacgtattagtcatcgctattaccatggtcgaggtgagccccacgttctgcttcactctccccatctcccccccctccccacccccaattttgtatttatttattttttaattattttgtgcagcgatgggggcggggggggggggggggcgcgcgccaggcggggcggggcggggcgaggggcggggcggggcgaggcggagaggtgcggcggcagccaatcagagcggcgcgctccgaaagtttccttttatggcgaggcggcggcggcggcggccctataaaaagcgaagcgcgcggcgggcgggagtcgctgcgcgctgccttcgccccgtgccccgctccgccgccgcctcgcgccgcccgccccggctctgactgaccgcgttactcccacaggtgagcgggcgggacggcccttctcctccgggctgtaattagcgcttggtttaatgacggcttgtttcttttctgtggctgcgtgaaagccttgaggggctccgggagggccctttgtgcggggggagcggctcggggggtgcgtgcgtgtgtgtgtgcgtggggagcgccgcgtgcggctccgcgctgcccggcggctgtgagcgctgcgggcgcggcgcggggctttgtgcgctccgcagtgtgcgcgaggggagcgcggccgggggcggtgccccgcggtgcggggggggctgcgaggggaacaaaggctgcgtgcggggtgtgtgcgtgggggggtgagcagggggtgtgggcgcgtcggtcgggctgcaaccccccctgcacccccctccccgagttgctgagcacggcccggcttcgggtgcggggctccgtacggggcgtggcgcggggctcgccgtgccgggcggggggtggcggcaggtgggggtgccgggcggggcggggccgcctcgggccggggagggctcgggggaggggcgcggcggcccccggagcgccggcggctgtcgaggcgcggcgagccgcagccattgccttttatggtaatcgtgcgagagggcgcagggacttcctttgtcccaaatctgtgcggagccgaaatctgggaggcgccgccgcaccccctctagcgggcgcggggcgaagcggtgcggcgccggcaggaaggaaatgggcggggagggccttcgtgcgtcgccgcgccgccgtccccttctccctctccagcctcggggctgtccgcggggggacggctgccttcgggggggacggggcagggcggggttcggcttctggcgtgtgaccggcggctctagagcctctgctaaccatgttcatgccttcttctttttcctacagctcctgggcaacgtgctggttattgtgctgtctcatcattttggcaaagaattggagaataaactagtattcttctggtccccacagactcagagagaacccgccaccatgttcgtgttcctggtgctgctgcccctggtgagcagccagtgcgtgaacctgaccaccaggacccagctgccccccgcctacaccaacagcttcaccaggggcgtgtactaccccgacaaggtgttcaggagcagcgtgctgcacagcacccaggacctgttcctgcccttcttcagcaacgtgacctggttccacgccatccacgtgagcggcaccaacggcaccaagaggttcgacaaccccgtgctgcccttcaacgacggcgtgtacttcgccagcaccgagaagagcaacatcatcaggggctggatcttcggcaccaccctggacagcaagacccagagcctgctgatcgtgaacaacgccaccaacgtggtgatcaaggtgtgcgagttccagttctgcaacgaccccttcctgggcgtgtactaccacaagaacaacaagagctggatggagagcgagttcagggtgtacagcagcgccaacaactgcaccttcgagtacgtgagccagcccttcctgatggacctggagggcaagcagggcaacttcaagaacctgagggagttcgtgttcaagaacatcgacggctacttcaagatctacagcaagcacacccccatcaacctggtgagggacctgccccagggcttcagcgccctggagcccctggtggacctgcccatcggcatcaacatcaccaggttccagaccctgctggccctgcacaggagctacctgacccccggcgacagcagcagcggctggaccgccggcgccgccgcctactacgtgggctacctgcagcccaggaccttcctgctgaagtacaacgagaacggcaccatcaccgacgccgtggactgcgccctggaccccctgagcgagaccaagtgcaccctgaagagcttcaccgtggagaagggcatctaccagaccagcaacttcagggtgcagcccaccgagagcatcgtgaggttccccaacatcaccaacctgtgccccttcggcgaggtgttcaacgccaccaggttcgccagcgtgtacgcctggaacaggaagaggatcagcaactgcgtggccgactacagcgtgctgtacaacagcgccagcttcagcaccttcaagtgctacggcgtgagccccaccaagctgaacgacctgtgcttcaccaacgtgtacgccgacagcttcgtgatcaggggcgacgaggtgaggcagatcgcccccggccagaccggcaagatcgccgactacaactacaagctgcccgacgacttcaccggctgcgtgatcgcctggaacagcaacaacctggacagcaaggtgggcggcaactacaactacctgtacaggctgttcaggaagagcaacctgaagcccttcgagagggacatcagcaccgagatctaccaggccggcagcaccccctgcaacggcgtggagggcttcaactgctacttccccctgcagagctacggcttccagcccaccaacggcgtgggctaccagccctacagggtggtggtgctgagcttcgagctgctgcacgcccccgccaccgtgtgcggccccaagaagagcaccaacctggtgaagaacaagtgcgtgaacttcaacttcaacggcctgaccggcaccggcgtgctgaccgagagcaacaagaagttcctgcccttccagcagttcggcagggacatcgccgacaccaccgacgccgtgagggacccccagaccctggagatcctggacatcaccccctgcagcttcggcggcgtgagcgtgatcacccccggcaccaacaccagcaaccaggtggccgtgctgtaccaggacgtgaactgcaccgaggtgcccgtggccatccacgccgaccagctgacccccacctggagggtgtacagcaccggcagcaacgtgttccagaccagggccggctgcctgatcggcgccgagcacgtgaacaacagctacgagtgcgacatccccatcggcgccggcatctgcgccagctaccagacccagaccaacagccccggcagcgccagcagcgtggccagccagagcatcatcgcctacaccatgagcctgggcgccgagaacagcgtggcctacagcaacaacagcatcgccatccccaccaacttcaccatcagcgtgaccaccgagatcctgcccgtgagcatgaccaagaccagcgtggactgcaccatgtacatctgcggcgacagcaccgagtgcagcaacctgctgctgcagtacggcagcttctgcacccagctgaacagggccctgaccggcatcgccgtggagcaggacaagaacacccaggaggtgttcgcccaggtgaagcagatctacaagaccccccccatcaaggacttcggcggcttcaacttcagccagatcctgcccgaccccagcaagcccagcaagaggagccccatcgaggacctgctgttcaacaaggtgaccctggccgacgccggcttcatcaagcagtacggcgactgcctgggcgacatcgccgccagggacctgatctgcgcccagaagttcaacggcctgaccgtgctgccccccctgctgaccgacgagatgatcgcccagtacaccagcgccctgctggccggcaccatcaccagcggctggaccttcggcgccggccccgccctgcagatccccttccccatgcagatggcctacaggttcaacggcatcggcgtgacccagaacgtgctgtacgagaaccagaagctgatcgccaaccagttcaacagcgccatcggcaagatccaggacagcctgagcagcacccccagcgccctgggcaagctgcaggacgtggtgaaccagaacgcccaggccctgaacaccctggtgaagcagctgagcagcaacttcggcgccatcagcagcgtgctgaacgacatcctgagcaggctggacccccccgaggccgaggtgcagatcgacaggctgatcaccggcaggctgcagagcctgcagacctacgtgacccagcagctgatcagggccgccgagatcagggccagcgccaacctggccgccaccaagatgagcgagtgcgtgctgggccagagcaagagggtggacttctgcggcaagggctaccacctgatgagcttcccccagagcgccccccacggcgtggtgttcctgcacgtgacctacgtgcccgcccaggagaagaacttcaccaccgcccccgccatctgccacgacggcaaggcccacttccccagggagggcgtgttcgtgagcaacggcacccactggttcgtgacccagaggaacttctacgagccccagatcatcaccaccgacaacaccttcgtgagcggcaactgcgacgtggtgatcggcatcgtgaacaacaccgtgtacgaccccctgcagcccgagctggacagcttcaaggaggagctggacaagtacttcaagaaccacaccagccccgacgtggacctgggcgacatcagcggcatcaacgccagcgtggtgaacatccagaaggagatcgacaggctgaacgaggtggccaagaacctgaacgagagcctgatcgacctgcaggagctgggcaagtacgagcagtacatcaagtggccctggtacatctggctgggcttcatcgccggcctgatcgccatcgtgatggtgaccatcatgctgtgctgcatgaccagctgctgcagctgcctgaagggctgctgcagctgcggcagctgctgcaagttcgacgaggacgacagcgagcccgtgctgaagggcgtgaagctgcactacaccggaagcggagccacgaacttctctctgttaaagcaagcaggagatgttgaagaaaaccccgggcctagcgccgacgcccagagcttcctgaacagggtgtgcggcgtgagcgccgccaggctgaccccctgcggcaccggcaccagcaccgacgtggtgtacagggccttcgacatctacaacgacaaggtggccggcttcgccaagttcctgaagaccaactgctgcaggttccaggagaaggacgaggacgacaacctgatcgacagctacttcgtggtgaagaggcacaccttcagcaactaccagcacgaggagaccatctacaacctgctgaaggactgccccgccgtggccaagcacgacttcttcaagttcaggatcgacggcgacatggtgccccacatcagcaggcagaggctgaccaagtacaccatggccgacctggtgtacgccctgaggcacttcgacgagggcaactgcgacaccctgaaggagatcctggtgacctacaactgctgcgacgacgactacttcaacaagaaggactggtacgacttcgtggagaaccccgacatcctgagggtgtacgccaacctgggcgagagggtgaggcaggccctgctgaagaccgtgcagttctgcgacgccatgaggaacgccggcatcgtgggcgtgctgaccctggacaaccaggacctgaacggcaactggtacgacttcggcgacttcatccagaccacccccggcagcggcgtgcccgtggtggacagctactacagcctgctgatgcccatcctgaccctgaccagggccctgaccgccgagagccacgtggacaccgacctgaccaagccctacatcaagtgggacctgctgaagtacgacttcaccgaggagaggctgaagctgttcgacaggtacttcaagtactgggaccagacctaccaccccaactgcgtgaactgcctggacgacaggtgcatcctgcactgcgccaacttcaacgtgctgttcagcaccgtgttcccccccaccagcttcggccccctggtgaggaagatcttcgtggacggcgtgcccttcgtggtgagcaccggctaccacttcagggagctgggcgtggtgcacaaccaggacgtgaacctgcacagcagcaggctgagcttcaaggagctgctggtgtacgccgccgaccccgccatgcacgccgccagcggcaacctgctgctggacaagaggaccacctgcttcagcgtggccgccctgaccaacaacgtggccttccagaccgtgaagcccggcaacttcaacaaggacttctacgacttcgccgtgagcaagggcttcttcaaggagggcagcagcgtggagctgaagcacttcttcttcgcccaggacggcaacgccgccatcagcgactacgactactacaggtacaacctgcccaccatgtgcgacatcaggcagctgctgttcgtggtggaggtggtggacaagtacttcgactgctacgacggcggctgcatcaacgccaaccaggtgatcgtgaacaacctggacaagagcgccggcttccccttcaacaagtggggcaaggccaggctgtactacgacagcatgagctacgaggaccaggacgccctgttcgcctacaccaagaggaacgtgatccccaccatcacccagatgaacctgaagtacgccatcagcgccaagaacagggccaggaccgtggccggcgtgagcatctgcagcaccatgaccaacaggcagttccaccagaagctgctgaagagcatcgccgccaccaggggcgccaccgtggtgatcggcaccagcaagttctacggcggctggcacaacatgctgaagaccgtgtacagcgacgtggagaacccccacctgatgggctgggactaccccaagtgcgacagggccatgcccaacatgctgaggatcatggccagcctggtgctggccaggaagcacaccacctgctgcagcctgagccacaggttctacaggctggccaacgagtgcgcccaggtgctgagcgagatggtgatgtgcggcggcagcctgtacgtgaagcccggcggcaccagcagcggcgacgccaccaccgcctacgccaacagcgtgttcaacatctgccaggccgtgaccgccaacgtgaacgccctgctgagcaccgacggcaacaagatcgccgacaagtacgtgaggaacctgcagcacaggctgtacgagtgcctgtacaggaacagggacgtggacaccgacttcgtgaacgagttctacgcctacctgaggaagcacttcagcatgatgatcctgagcgacgacgccgtggtgtgcttcaacagcacctacgccagccagggcctggtggccagcatcaagaacttcaagagcgtgctgtactaccagaacaacgtgttcatgagcgaggccaagtgctggaccgagaccgacctgaccaagggcccccacgagttctgcagccagcacaccatgctggtgaagcagggcgacgactacgtgtacctgccctaccccgaccccagcaggatcctgggcgccggctgcttcgtggacgacatcgtgaagaccgacggcaccctgatgatcgagaggttcgtgagcctggccatcgacgcctaccccctgaccaagcaccccaaccaggagtacgccgacgtgttccacctgtacctgcagtacatcaggaagctgcacgacgagctgaccggccacatgctggacatgtacagcgtgatgctgaccaacgacaacaccagcaggtactgggagcccgagttctacgaggccatgtacaccccccacaccgtgctgcagtgactcgagctggtactgcatgcacgcaatgctagctgcccctttcccgtcctgggtaccccgagtctcccccgacctcgggtcccaggtatgctcccacctccacctgccccactcaccacctctgctagttccagacacctcccaagcacgcagcaatgcagctcaaaacgcttagcctagccacacccccacgggaaacagcagtgattaacctttagcaataaacgaaagtttaactaagctatactaaccccagggttggtcaatttcgtgccagccacaccctggagctagcaaaaaaaa

SEQ ID NO: 147 - DNA, 6812 bp, synthetic construct
  misc_feature 1..6812: note = Synthesized Vaccine Candidate 9
  source 1..6812: mol_type = other DNA
ctcgacattgattattgactagttattaatagtaatcaattacggggtcattagttcatagcccatatatggagttccgcgttacataacttacggtaaatggcccgcctggctgaccgcccaacgacccccgcccattgacgtcaataatgacgtatgttcccatagtaacgccaatagggactttccattgacgtcaatgggtggagtatttacggtaaactgcccacttggcagtacatcaagtgtatcatatgccaagtacgccccctattgacgtcaatgacggtaaatggcccgcctggcattatgcccagtacatgaccttatgggactttcctacttggcagtacatctacgtattagtcatcgctattaccatggtcgaggtgagccccacgttctgcttcactctccccatctcccccccctccccacccccaattttgtatttatttattttttaattattttgtgcagcgatgggggcggggggggggggggggcgcgcgccaggcggggcggggcggggcgaggggcggggcggggcgaggcggagaggtgcggcggcagccaatcagagcggcgcgctccgaaagtttccttttatggcgaggcggcggcggcggcggccctataaaaagcgaagcgcgcggcgggcgggagtcgctgcgcgctgccttcgccccgtgccccgctccgccgccgcctcgcgccgcccgccccggctctgactgaccgcgttactcccacaggtgagcgggcgggacggcccttctcctccgggctgtaattagcgcttggtttaatgacggcttgtttcttttctgtggctgcgtgaaagccttgaggggctccgggagggccctttgtgcggggggagcggctcggggggtgcgtgcgtgtgtgtgtgcgtggggagcgccgcgtgcggctccgcgctgcccggcggctgtgagcgctgcgggcgcggcgcggggctttgtgcgctccgcagtgtgcgcgaggggagcgcggccgggggcggtgccccgcggtgcggggggggctgcgaggggaacaaaggctgcgtgcggggtgtgtgcgtgggggggtgagcagggggtgtgggcgcgtcggtcgggctgcaaccccccctgcacccccctccccgagttgctgagcacggcccggcttcgggtgcggggctccgtacggggcgtggcgcggggctcgccgtgccgggcggggggtggcggcaggtgggggtgccgggcggggcggggccgcctcgggccggggagggctcgggggaggggcgcggcggcccccggagcgccggcggctgtcgaggcgcggcgagccgcagccattgccttttatggtaatcgtgcgagagggcgcagggacttcctttgtcccaaatctgtgcggagccgaaatctgggaggcgccgccgcaccccctctagcgggcgcggggcgaagcggtgcggcgccggcaggaaggaaatgggcggggagggccttcgtgcgtcgccgcgccgccgtccccttctccctctccagcctcggggctgtccgcggggggacggctgccttcgggggggacggggcagggcggggttcggcttctggcgtgtgaccggcggctctagagcctctgctaaccatgttcatgccttcttctttttcctacagctcctgggcaacgtgctggttattgtgctgtctcatcattttggcaaagaattggagaataaactagtattcttctggtccccacagactcagagagaacccgccaccatgttcgtgttcctggtgctgctgcccctggtgagcagccagtgcgtgaacctgaccaccaggacccagctgccccccgcctacaccaacagcttcaccaggggcgtgtactaccccgacaaggtgttcaggagcagcgtgctgcacagcacccaggacctgttcctgcccttcttcagcaacgtgacctggttccacgccatccacgtgagcggcaccaacggcaccaagaggttcgacaaccccgtgctgcccttcaacgacggcgtgtacttcgccagcaccgagaagagcaacatcatcaggggctggatcttcggcaccaccctggacagcaagacccagagcctgctgatcgtgaacaacgccaccaacgtggtgatcaaggtgtgcgagttccagttctgcaacgaccccttcctgggcgtgtactaccacaagaacaacaagagctggatggagagcgagttcagggtgtacagcagcgccaacaactgcaccttcgagtacgtgagccagcccttcctgatggacctggagggcaagcagggcaacttcaagaacctgagggagttcgtgttcaagaacatcgacggctacttcaagatctacagcaagcacacccccatcaacctggtgagggacctgccccagggcttcagcgccctggagcccctggtggacctgcccatcggcatcaacatcaccaggttccagaccctgctggccctgcacaggagctacctgacccccggcgacagcagcagcggctggaccgccggcgccgccgcctactacgtgggctacctgcagcccaggaccttcctgctgaagtacaacgagaacggcaccatcaccgacgccgtggactgcgccctggaccccctgagcgagaccaagtgcaccctgaagagcttcaccgtggagaagggcatctaccagaccagcaacttcagggtgcagcccaccgagagcatcgtgaggttccccaacatcaccaacctgtgccccttcggcgaggtgttcaacgccaccaggttcgccagcgtgtacgcctggaacaggaagaggatcagcaactgcgtggccgactacagcgtgctgtacaacagcgccagcttcagcaccttcaagtgctacggcgtgagccccaccaagctgaacgacctgtgcttcaccaacgtgtacgccgacagcttcgtgatcaggggcgacgaggtgaggcagatcgcccccggccagaccggcaagatcgccgactacaactacaagctgcccgacgacttcaccggctgcgtgatcgcctggaacagcaacaacctggacagcaaggtgggcggcaactacaactacctgtacaggctgttcaggaagagcaacctgaagcccttcgagagggacatcagcaccgagatctaccaggccggcagcaccccctgcaacggcgtggagggcttcaactgctacttccccctgcagagctacggcttccagcccaccaacggcgtgggctaccagccctacagggtggtggtgctgagcttcgagctgctgcacgcccccgccaccgtgtgcggccccaagaagagcaccaacctggtgaagaacaagtgcgtgaacttcaacttcaacggcctgaccggcaccggcgtgctgaccgagagcaacaagaagttcctgcccttccagcagttcggcagggacatcgccgacaccaccgacgccgtgagggacccccagaccctggagatcctggacatcaccccctgcagcttcggcggcgtgagcgtgatcacccccggcaccaacaccagcaaccaggtggccgtgctgtaccaggacgtgaactgcaccgaggtgcccgtggccatccacgccgaccagctgacccccacctggagggtgtacagcaccggcagcaacgtgttccagaccagggccggctgcctgatcggcgccgagcacgtgaacaacagctacgagtgcgacatccccatcggcgccggcatctgcgccagctaccagacccagaccaacagccccggcagcgccagcagcgtggccagccagagcatcatcgcctacaccatgagcctgggcgccgagaacagcgtggcctacagcaacaacagcatcgccatccccaccaacttcaccatcagcgtgaccaccgagatcctgcccgtgagcatgaccaagaccagcgtggactgcaccatgtacatctgcggcgacagcaccgagtgcagcaacctgctgctgcagtacggcagcttctgcacccagctgaacagggccctgaccggcatcgccgtggagcaggacaagaacacccaggaggtgttcgcccaggtgaagcagatctacaagaccccccccatcaaggacttcggcggcttcaacttcagccagatcctgcccgaccccagcaagcccagcaagaggagccccatcgaggacctgctgttcaacaaggtgaccctggccgacgccggcttcatcaagcagtacggcgactgcctgggcgacatcgccgccagggacctgatctgcgcccagaagttcaacggcctgaccgtgctgccccccctgctgaccgacgagatgatcgcccagtacaccagcgccctgctggccggcaccatcaccagcggctggaccttcggcgccggccccgccctgcagatccccttccccatgcagatggcctacaggttcaacggcatcggcgtgacccagaacgtgctgtacgagaaccagaagctgatcgccaaccagttcaacagcgccatcggcaagatccaggacagcctgagcagcacccccagcgccctgggcaagctgcaggacgtggtgaaccagaacgcccaggccctgaacaccctggtgaagcagctgagcagcaacttcggcgccatcagcagcgtgctgaacgacatcctgagcaggctggacccccccgaggccgaggtgcagatcgacaggctgatcaccggcaggctgcagagcctgcagacctacgtgacccagcagctgatcagggccgccgagatcagggccagcgccaacctggccgccaccaagatgagcgagtgcgtgctgggccagagcaagagggtggacttctgcggcaagggctaccacctgatgagcttcccccagagcgccccccacggcgtggtgttcctgcacgtgacctacgtgcccgcccaggagaagaacttcaccaccgcccccgccatctgccacgacggcaaggcccacttccccagggagggcgtgttcgtgagcaacggcacccactggttcgtgacccagaggaacttctacgagccccagatcatcaccaccgacaacaccttcgtgagcggcaactgcgacgtggtgatcggcatcgtgaacaacaccgtgtacgaccccctgcagcccgagctggacagcttcaaggaggagctggacaagtacttcaagaaccacaccagccccgacgtggacctgggcgacatcagcggcatcaacgccagcgtggtgaacatccagaaggagatcgacaggctgaacgaggtggccaagaacctgaacgagagcctgatcgacctgcaggagctgggcaagtacgagcagtacatcaagtggccctggtacatctggctgggcttcatcgccggcctgatcgccatcgtgatggtgaccatcatgctgtgctgcatgaccagctgctgcagctgcctgaagggctgctgcagctgcggcagctgctgcaagttcgacgaggacgacagcgagcccgtgctgaagggcgtgaagctgcactacaccggaagcggagccacgaacttctctctgttaaagcaagcaggagatgttgaagaaaaccccgggcctatgaacaggaaggtgaccgccatcgccctggccgccatcatctgggccaccgccgcccagggcttcctgatgttcaagcagggcaggtgcctgtgcatcggccccggcatgaaggccgtgaagatggccgagatcgagaaggccagcgtgatctaccccagcaacggctgcgacaaggtggaggtgatcgtgaccatgaaggcccacaagaggcagaggtgcctggaccccaggagcaagcaggccaggctgatcatgcaggccatcgagaagaagaacttcctgaggaggcagaacatgtgaggaagcggagccacgaacttctctctgttaaagcaagcaggagatgttgaagaaaaccccgggcctatgttccacgtgagcttcaggtacatcttcggcatcccccccctgatcctggtgctgctgcccgtgaccagcagcgagtgccacatcaaggacaaggagggcaaggcctacgagagcgtgctgatgatcagcatcgacgagctggacaagatgaccggcaccgacagcaactgccccaacaacgagcccaacttcttcaggaagcacgtgtgcgacgacaccaaggaggccgccttcctgaacagggccgccaggaagctgaagcagttcctgaagatgaacatcagcgaggagttcaacgtgcacctgctgaccgtgagccagggcacccagaccctggtgaactgcaccagcaaggaggagaagaacgtgaaggagcagaagaagaacgacgcctgcttcctgaagaggctgctgagggagatcaagacctgctggaacaagatcctgaagggcagcatctgatgactcgagctggtactgcatgcacgcaatgctagctgcccctttcccgtcctgggtaccccgagtctcccccgacctcgggtcccaggtatgctcccacctccacctgccccactcaccacctctgctagttccagacacctcccaagcacgcagcaatgcagctcaaaacgcttagcctagccacacccccacgggaaacagcagtgattaacctttagcaataaacgaaagtttaactaagctatactaaccccagggttggtcaatttcgtgccagccacaccctggagctagcaaaaaaaa

SEQ ID NO: 148 - DNA, 3947 bp, synthetic construct
  misc_feature 1..3947: note = Synthesized Spike glycoprotein with 6 stabilizing mutations
  source 1..3947: mol_type = other DNA
atgttcgtgttcctggtgctgctgcccctggtgagcagccagtgcgtgaacctgaccacccggacccagctgccaccagcctacaccaacagcttcacccggggcgtctactaccccgacaaggtgttccggagcagcgtcctgcacagcacccaggacctgttcctgcccttcttcagcaacgtgacctggttccacgccatccacgtgagcggcaccaacggcaccaagcggttcgacaaccccgtgctgcccttcaacgacggcgtgtacttcgccagcaccgagaagagcaacatcatccggggctggatcttcggcaccaccctggacagcaagacccagagcctgctgatcgtgaataacgccaccaacgtggtgatcaaggtgtgcgagttccagttctgcaacgaccccttcctgggcgtgtactaccacaagaacaacaagagctggatggagagcgagttccgggtgtacagcagcgccaacaactgcaccttcgagtacgtgagccagcccttcctgatggacctggagggcaagcagggcaacttcaagaacctgcgggagttcgtgttcaagaacatcgacggctacttcaagatctacagcaagcacaccccaatcaacctggtgcgggatctgccccagggcttctcagccctggagcccctggtggacctgcccatcggcatcaacatcacccggttccagaccctgctggccctgcaccggagctacctgaccccaggcgacagcagcagcgggtggacagcaggcgcggctgcttactacgtgggctacctgcagccccggaccttcctgctgaagtacaacgagaacggcaccatcaccgacgccgtggactgcgccctggaccctctgagcgagaccaagtgcaccctgaagagcttcaccgtggagaagggcatctaccagaccagcaacttccgggtgcagcccaccgagagcatcgtgcggttccccaacatcaccaacctgtgccccttcggcgaggtgttcaacgccacccggttcgccagcgtgtacgcctggaaccggaagcggatcagcaactgcgtggccgactacagcgtgctgtacaacagcgccagcttcagcaccttcaagtgctacggcgtgagccccaccaagctgaacgacctgtgcttcaccaacgtgtacgccgacagcttcgtgatccgtggcgacgaggtgcggcagatcgcacccggccagacaggcaagatcgccgactacaactacaagctgcccgacgacttcaccggctgcgtgatcgcctggaacagcaacaacctcgacagcaaggtgggcggcaactacaactacctgtaccggctgttccggaagagcaacctgaagcccttcgagcgggacatcagcaccgagatctaccaagccggctccaccccttgcaacggcgtggagggcttcaactgctacttccctctgcagagctacggcttccagcccaccaacggcgtgggctaccagccctaccgggtggtggtgctgagcttcgagctgctgcacgccccagccaccgtgtgtggccccaagaagagcaccaacctggtgaagaacaagtgcgtgaacttcaacttcaacggccttaccggcaccggcgtgctgaccgagagcaacaagaaattcctgccctttcagcagttcggccgggacatcgccgacaccaccgacgctgtgcgggatccccagaccctggagatcctggacatcaccccttgcagcttcggcggcgtgagcgtgatcaccccaggcaccaacaccagcaaccaggtggccgtgctgtaccaggacgtgaactgcaccgaggtgcccgtggccatccacgccgaccagctgacacccacctggcgggtctacagcaccggcagcaacgtgttccagacccgggccggttgcctgatcggcgccgagcacgtgaacaacagctacgagtgcgacatccccatcggcgccggcatctgtgccagctaccagacccagaccaattcacccggcagcgccagcagcgtggccagccagagcatcatcgcctacaccatgagcctgggcgccgagaacagcgtggcctacagcaacaacagcatcgccatccccaccaacttcaccatcagcgtgaccaccgagattctgcccgtgagcatgaccaagaccagcgtggactgcaccatgtacatctgcggcgacagcaccgagtgcagcaacctgctgctgcagtacggcagcttctgcacccagctgaaccgggccctgaccggcatcgccgtggagcaggacaagaacacccaggaggtgttcgcccaggtgaagcagatctacaagacccctcccatcaaggacttcggcggcttcaacttcagccagatcctgcccgaccccagcaagcccagcaagcggagccccatcgaggacctgctgttcaacaaggtgaccctagccgacgccggcttcatcaagcagtacggcgactgcctcggcgacatagccgcccgggacctgatctgcgcccagaagttcaacggcctgaccgtgctgcctcccctgctgaccgacgagatgatcgcccagtacaccagcgccctgttagccggaaccatcaccagcggctggactttcggcgctggccccgctctgcagatccccttccccatgcagatggcctaccggttcaacggcatcggcgtgacccagaacgtgctgtacgagaaccagaagctgatcgccaaccagttcaacagcgccatcggcaagatccaggacagcctgagcagcacccctagcgccctgggcaagctgcaggacgtggtgaaccagaacgcccaggccctgaacaccctggtgaagcagctgagcagcaacttcggcgccatcagcagcgtgctgaacgacatcctgagccggctggaccctcccgaggccgaggtgcagatcgaccggctgatcactggccggctgcagagcctgcagacctacgtgacccagcagctgatccgggccgccgagattcgggccagcgccaacctggccgccaccaagatgagcgagtgcgtgctgggccagagcaagcgggtggacttctgcggcaagggctaccacctgatgagctttccccagagcgcaccccacggagtggtgttcctgcacgtgacctacgtgcccgcccaggagaagaacttcaccaccgccccagccatctgccacgacggcaaggcccactttccccgggagggcgtgttcgtgagcaacggcacccactggttcgtgacccagcggaacttctacgagccccagatcatcaccaccgacaacaccttcgtgagcggcaactgcgacgtggtgatcggcatcgtgaacaacaccgtgtacgatcccctgcagcccgagctggacagcttcaaggaggagctggacaagtacttcaagaatcacaccagccccgacgtggacctgggcgacatcagcggcatcaacgccagcgtggtgaacatccagaaggagatcgatcggctgaacgaggtggccaagaacctgaacgagagcctgatcgacctgcaggagctgggcaagtacgagcagtacatcaagtggccctggtacatctggctgggcttcatcgccggcctgatcgccatcgtgatggtgaccatcatgctgtgctgcatgaccagctgctgcagctgcctgaagggctgttgcagctgcggcagctgctgcaagttcgacgaggacgacagcgagcccgtgctgaagggcgtgaagctgcactacacctgataataggctggagcctcggtggcctagcttcttgccccttgggcctccccccagcccctcctccccttcctgcacccgtacccccgtggtctttgaataaagtctgagtgggcggcaaaaaaaaa

SEQ ID NO: 149 - DNA, 3947 bp, synthetic construct; identical to SEQ ID NO: 148
  misc_feature 1..3947: note = Synthesized Spike glycoprotein with one stabilizing mutations
  source 1..3947: mol_type = other DNA

SEQ ID NO: 150 - DNA, 1257 bp, synthetic construct
  misc_feature 1..1257: note = Nucleocaspid protein from SARS-CoV-2
  source 1..1257: mol_type = other DNA
atgagcgacaacggcccccagaaccagaggaacgcccccaggatcaccttcggcggccccagcgacagcaccggcagcaaccagaacggcgagaggagcggcgccaggagcaagcagaggaggccccagggcctgcccaacaacaccgccagctggttcaccgccctgacccagcacggcaaggaggacctgaagttccccaggggccagggcgtgcccatcaacaccaacagcagccccgacgaccagatcggctactacaggagggccaccaggaggatcaggggcggcgacggcaagatgaaggacctgagccccaggtggtacttctactacctgggcaccggccccgaggccggcctgccctacggcgccaacaaggacggcatcatctgggtggccaccgagggcgccctgaacacccccaaggaccacatcggcaccaggaaccccgccaacaacgccgccatcgtgctgcagctgccccagggcaccaccctgcccaagggcttctacgccgagggcagcaggggcggcagccaggccagcagcaggagcagcagcaggagcaggaacagcagcaggaacagcacccccggcagcagcaggggcaccagccccgccaggatggccggcaacggcggcgacgccgccctggccctgctgctgctggacaggctgaaccagctggagagcaagatgagcggcaagggccagcagcagcagggccagaccgtgaccaagaagagcgccgccgaggccagcaagaagcccaggcagaagaggaccgccaccaaggcctacaacgtgacccaggccttcggcaggaggggccccgagcagacccagggcaacttcggcgaccaggagctgatcaggcagggcaccgactacaagcactggccccagatcgcccagttcgcccccagcgccagcgccttcttcggcatgagcaggatcggcatggaggtgacccccagcggcacctggctgacctacaccggcgccatcaagctggacgacaaggaccccaacttcaaggaccaggtgatcctgctgaacaagcacatcgacgcctacaagaccttcccccccaccgagcccaagaaggacaagaagaagaaggccgacgagacccaggccctgccccagaggcagaagaagcagcagaccgtgaccctgctgcccgccgccgacctggacgacttcagcaagcagctgcagcagagcatgagcagcgccgacagcacccaggcc

SEQ ID NO: 151 - DNA, 3685 bp, synthetic construct
  misc_feature 1..3685: note = ORF1abprotein (non-annotated) from SARS-CoV-2
  source 1..3685: mol_type = other DNA
caaaccactgaaacagcwcactcttgtaatgttaaccgctttaatgtggctattacaagagcaaaaattggcattttgtgcataatgtctgacagagatctttatgacaagctgcaattcacaagtctagaagtaccgcgtcgtaacgtggctacattacaagcggaaaatgtaactggactctttaaggactgtagtaagatcataactggtcttcatcctacacaagcacctacacaccttagtgttgatacaaaattcaagactgagggactatgtgttgacataccaggcatwccwaaggacatgacctatmgwagactcatctcyatgatgggtttcaaaatgaattaycaagttaatggttaccctaayatgttyatcacccgygargaagccatmmgmcaygtwcgtgcatggattggctttgatgtagagggktgtcatgctactagggatgctgtcggtactaacctacctctccagttaggattttctacaggtgttaacttagtagctgtaccaactggctatgttgacactgaaaacaatacagaattcaccagagttaatgcaaaacctccaccaggtgaccaatttaaacatcttataccacttatgtacaaaggtttaccctggaacatagtgcgtatcaagatagtacaaatgctcagtgatacactgaaaggattatcrgacagagttgtgtttgtcctatgggcacatggctttgaacttacatcaatgaagtactttgtcaagattggacctgaaagaacgtgttgtctgtgtgacaaacgtgcaacttgtttttctacttcatcagacaattatgcctgctggaaccattctgtgggttttgactatgtctataatccatttatgattgatgtccagcagtggggttttacaggtaaccttcagagtaatcacgatcagcattgccaagtgcatggcaacgctcatgtggctagttgtgatgctatcatgactagatgtttagcagtccatgagtgctttgttaagcgcgttgactggtctgttgagtacccaattataggtgatgaactgaagatcaatgccgcatgcagaaaagtgcaacatatggttgtaaagtctgcattgcttgctgacaaattcccagttcttcatgacattggaaacccaaaggctatcaaatgtgtcccrcaggctgaagtggattggaagttctatgatgctcagccctgcagtgacaaagcttataaaataaaagaactcttctattcttatgctacacatcatgataaattcattgatggtgtttgtttattttggaattgtaacgttgatcgttaccctgccaatgctattgtrtgcaggttcgacacgagagtcttgtcaaatttgaacttgccaggttgtgatggtggtagtttgtatgtaaataagcatgcattccacactccagcttttgataaaagtgcatttactaatttaaagcaattgcctttcttttattactctgacagtccctgtgagtcacatggcaagcaggttgtttctgacattgattatgtaccactcaaatctgctacrtgtataacacgatgcaatttgggrggtgctgtttgcagacatcatgcaaatgagtaccgacagtacttggatgcatacaatatgatgatttctgctggctttagcctctggatttacaaacagtttgacacttataacctgtggaacacctttaccaggttacagagtttagaaaatgtggcttacaatgttgttaacaaaggacacttcgatggacaagctggtgaagcacctgtttccgtcattaataatgttgtttacacaaaggtagatggtgttgatgtagagatctttgaaaacaagacaacacttcctgttaatgttgcatttgagctttgggctaagcgtaacattaaaccagtgccagagattaagatactcaataatttgggtgtcgatatcgctgctaatactgtaatctgggactacaagagagaagcaccagcacatatgtcaacaataggtgtctgcacaatgactgacattgccaagaaacctactgagagtgcttgttcctcgcttactgtcttatttgatggtagagtggaaggacaggtagacctttttagaaatgcccgtaatggtgttttaataacagaaggttcagttaaaggtttaataccttcaaagggaccagcacaagctagtgtcaatggagtcacattaattggagaatcagtaaaaacacagtttaattattttaagaaagtagatggcatcattcaacagttgcctgaaacctactttactcagagccgagacttagaggatttcaagcccagatcacaaatggaaactgactttcttgagctcgctatggatgaattcatacaacggtacaagcttgaaggctatgccttcgaacatatcgtttatggagattttagtcatggacagcttggtggacttcatctaatgattggtctagctaagcgctcacaagattcaccacttaaattagaggattttatccctacggacagtacagtgaaaaattatttcataacagatgcgcaaacaggttcatcaaaatgcgtgtgctctgttattgatcttctgcttgatgactttgttgagataataaagtcacaagatttatcagtggtttcaaaggtggtcaaagtcacaattgactatgctgaaatttcattcatgttatggtgtaaggatggacatgttgaaaccttttacccaaaattacaagcgagtcaggcgtggcaaccaggagttgcaatgcctaacttgtataagatgcagagaatgcttcttgaaaaatgtgaccttcagaattatggtgaaaatgctgtcataccaaarggaataatgatgaatgtcgcaaaatatactcaactgtgtcaatatttaaatacactyacattagcygtgccatataatatgagagttatccattttggtgctggctcrgacaaaggagttgcacccggcacagctgttctcagacagtggttgccaattggcacactacttgttgattcagatcttaacgacttcgtctctgacgctgattccactctaattggagactgtgcaaccgtacatacagctaacaaatgggatctcattattagcgatatgtatgatcctaaaaccaaacacgtgacaaaggaaaatgattcaaaagaaggatttttcacttacctgtgtggatttattaaacaaaaattagccctgggaggctctgtggctgtaaagataactgagcattcttggaatgcggatctctacaagctcatgggacatttctcatggtggacagcttttgttacaaatgttaatgcatcttcatcagaagcatttttaattggagttaactatcttggtaagccaaaagaacaaattgatggttacaccatgcatgctaactacattttctggaggaatacaaacccgattcaattgtcttcctattcactttttgacatgagtaagttccctcttaaattaaggggaacagctgtcatgtctttaaaggagaaccaaatcaatgaaatgatttattctctacttgaaaaaggcagacttatcattagggaaaacaacagagttgttgtctcaagtgatgttcttgttaataactaaacgaaca

SEQ ID NO: 152 - DNA, 825 bp, synthetic construct
  misc_feature 1..825: note = ORF3a protein from SARS-CoV-2
  source 1..825: mol_type = other DNA
atggacctgttcatgaggatcttcaccatcggcaccgtgaccctgaagcagggcgagatcaaggacgccacccccagcgacttcgtgagggccaccgccaccatccccatccaggccagcctgcccttcggctggctgatcgtgggcgtggccctgctggccgtgttccagagcgccagcaagatcatcaccctgaagaagaggtggcagctggccctgagcaagggcgtgcacttcgtgtgcaacctgctgctgctgttcgtgaccgtgtacagccacctgctgctggtggccgccggcctggaggcccccttcctgtacctgtacgccctggtgtacttcctgcagagcatcaacttcgtgaggatcatcatgaggctgtggctgtgctggaagtgcaggagcaagaaccccctgctgtacgacgccaactacttcctgtgctggcacaccaactgctacgactactgcatcccctacaacagcgtgaccagcagcatcgtgatcaccagcggcgacggcaccaccagccccatcagcgagcacgactaccagatcggcggctacaccgagaagtgggagagcggcgtgaaggactgcgtggtgctgcacagctacttcaccagcgactactaccagctgtacagcacccagctgagcaccgacaccggcgtggagcacgtgaccttcttcatctacaacaagatcgtggacgagcccgaggagcacgtgcagatccacaccatcgacggcagcagcggcgtggtgaaccccgtgatggagcccatctacgacgagcccaccaccaccaccagcgtgcccctg

SEQ ID NO: 153 - DNA, 225 bp, synthetic construct
  misc_feature 1..225: note = Envelope Protein from SARS-CoV-2
  source 1..225: mol_type = other DNA
atgtacagcttcgtgagcgaggagaccggcaccctgatcgtgaacagcgtgctgctgttcctggccttcgtggtgttcctgctggtgaccctggccatcctgaccgccctgaggctgtgcgcctactgctgcaacatcgtgaacgtgagcctggtgaagcccagcttctacgtgtacagcagggtgaagaacctgaacagcagcagggtgcccgacctgctggtg

SEQ ID NO: 154 - DNA, 666 bp, synthetic construct
  misc_feature 1..666: note = Membrane protein from SARS-CoV-2
  source 1..666: mol_type = other DNA
atggccgacagcaacggcaccatcaccgtggaggagctgaagaagctgctggagcagtggaacctggtgatcggcttcctgttcctgacctggatctgcctgctgcagttcgcctacgccaacaggaacaggttcctgtacatcatcaagctgatcttcctgtggctgctgtggcccgtgaccctggcctgcttcgtgctggccgccgtgtacaggatcaactggatcaccggcggcatcgccatcgccatggcctgcctggtgggcctgatgtggctgagctacttcatcgccagcttcaggctgttcgccaggaccaggagcatgtggagcttcaaccccgagaccaacatcctgctgaacgtgcccctgcacggcaccatcctgaccaggcccctgctggagagcgagctggtgatcggcgccgtgatcctgaggggccacctgaggatcgccggccaccacctgggcaggtgcgacatcaaggacctgcccaaggagatcaccgtggccaccagcaggaccctgagctactacaagctgggcgccagccagagggtggccggcgacagcggcttcgccgcctacagcaggtacaggatcggcaactacaagctgaacaccgaccacagcagcagcagcgacaacatcgccctgctggtgcag

SEQ ID NO: 155 - DNA, 183 bp, synthetic construct
  misc_feature 1..183: note = ORF6 protein from SARS-CoV-2
  source 1..183: mol_type = other DNA
atgttccacctggtggacttccaggtgaccatcgccgagatcctgctgatcatcatgaggaccttcaaggtgagcatctggaacctggactacatcatcaacctgatcatcaagaacctgagcaagagcctgaccgagaacaagtacagccagctggacgaggagcagcccatggagatcgac

SEQ ID NO: 156 - DNA, 87 bp, synthetic construct
  misc_feature 1..87: note = ORF7a protein from SARS-CoV-2
  source 1..87: mol_type = other DNA
atgaagatcatcctgttcctggccctgatcaccctggccacctgcgagctgtaccactaccaggagtgcgtgaggggcaccaccgtg

SEQ ID NO: 157 - DNA, 2286 bp, synthetic construct
  misc_feature 1..2286: note = Nsp3 from SARS-CoV-2
  source 1..2286: mol_type = other DNA
gcccccaccaaggtgaccttcggcgacgacaccgtgatcgaggtgcagggctacaagagcgtgaacatcaccttcgagctggacgagaggatcgacaaggtgctgaacgagaagtgcagcgcctacaccgtggagctgggcaccgaggtgaacgagttcgcctgcgtggtggccgacgccgtgatcaagaccctgcagcccgtgagcgagctgctgacccccctgggcatcgacctggacgagtggagcatggccacctactacctgttcgacgagagcggcgagttcaagctggccagccacatgtactgcagcttctacccccccgacgaggacgaggaggagggcgactgcgaggaggaggagttcgagcccagcacccagtacgagtacggcaccgaggacgactaccagggcaagcccctggagttcggcgccaccagcgccgccctgcagcccgaggaggagcaggaggaggactggctggacgacgacagccagcagaccgtgggccagcaggacggcagcgaggacaaccagaccaccaccatccagaccatcgtggaggtgcagccccagctggagatggagctgacccccgtggtgcagaccatcgaggtgaacagcttcagcggctacctgaagctgaccgacaacgtgtacatcaagaacgccgacatcgtggaggaggccaagaaggtgaagcccaccgtggtggtgaacgccgccaacgtgtacctgaagcacggcggcggcgtggccggcgccctgaacaaggccaccaacaacgccatgcaggtggagagcgacgactacatcgccaccaacggccccctgaaggtgggcggcagctgcgtgctgagcggccacaacctggccaagcactgcctgcacgtggtgggccccaacgtgaacaagggcgaggacatccagctgctgaagagcgcctacgagaacttcaaccagcacgaggtgctgctggcccccctgctgagcgccggcatcttcggcgccgaccccatccacagcctgagggtgtgcgtggacaccgtgaggaccaacgtgtacctggccgtgttcgacaagaacctgtacgacaagctggtgagcagcttcctggagatgaagagcgagaagcaggtggagcagaagatcgccgagatccccaaggaggaggtgaagcccttcatcaccgagagcaagcccagcgtggagcagaggaagcaggacgacaagaagatcaaggcctgcgtggaggaggtgaccaccaccctggaggagaccaagttcctgaccgagaacctgctgctgtacatcgacatcaacggcaacctgcaccccgacagcgccaccctggtgagcgacatcgacatcaccttcctgaagaaggacgccccctacatcgtgggcgacgtggtgcaggagggcgtgctgaccgccgtggtgatccccaccaagaaggccggcggcaccaccgagatgctggccaaggccctgaggaaggtgcccaccgacaactacatcaccacctaccccggccagggcctgaacggctacaccgtggaggaggccaagaccgtgctgaagaagtgcaagagcgccttctacatcctgcccagcatcatcagcaacgagaagcaggagatcctgggcaccgtgagctggaacctgagggagatgctggcccacgccgaggagaccaggaagctgatgcccgtgtgcgtggagaccaaggccatcgtgagcaccatccagaggaagtacaagggcatcaagatccaggagggcgtggtggactacggcgccaggttctacttctacaccagcaagaccaccgtggccagcctgatcaacaccctgaacgacctgaacgagaccctggtgaccatgcccctgggctacgtgacccacggcctgaacctggaggaggccgccaggtacatgaggagcctgaaggtgcccgccaccgtgagcgtgagcagccccgacgccgtgaccgcctacaacggctacctgaccagcagcagcaagacccccgaggagcacttcatcgagaccatcagcctggccggcagctacaaggactggagctacagcggccagagcacccagctgggcatcgagttcctgaagaggggcgacaagagcgtgtactacaccagcaaccccaccaccttccacctggacggcgaggtgatcaccttcgacaacctgaagaccctgctgagcctgagggaggtgaggaccatcaaggtgttcaccaccgtggacaacatcaacctgcac

SEQ ID NO: 158 - DNA, 918 bp, synthetic construct
  misc_feature 1..918: note = Nsp5 from SARS-CoV-2
  source 1..918: mol_type = other DNA
agcggcttcaggaagatggccttccccagcggcaaggtggagggctgcatggtgcaggtgacctgcggcaccaccaccctgaacggcctgtggctggacgacgtggtgtactgccccaggcacgtgatctgcaccagcgaggacatgctgaaccccaactacgaggacctgctgatcaggaagagcaaccacaacttcctggtgcaggccggcaacgtgcagctgagggtgatcggccacagcatgcagaactgcgtgctgaagctgaaggtggacaccgccaaccccaagacccccaagtacaagttcgtgaggatccagcccggccagaccttcagcgtgctggcctgctacaacggcagccccagcggcgtgtaccagtgcgccatgaggcccaacttcaccatcaagggcagcttcctgaacggcagctgcggcagcgtgggcttcaacatcgactacgactgcgtgagcttctgctacatgcaccacatggagctgcccaccggcgtgcacgccggcaccgacctggagggcaacttctacggccccttcgtggacaggcagaccgcccaggccgccggcaccgacaccaccatcaccgtgaacgtgctggcctggctgtacgccgccgtgatcaacggcgacaggtggttcctgaacaggttcaccaccaccctgaacgacttcaacctggtggccatgaagtacaactacgagcccctgacccaggaccacgtggacatcctgggccccctgagcgcccagaccggcatcgccgtgctggacatgtgcgccagcctgaaggagctgctgcagaacggcatgaacggcaggaccatcctgggcagcgccctgctggaggacgagttcacccccttcgacgtggtgaggcagtgcagcggcgtgaccttccag

SEQ ID NO: 159 - DNA, 2796 bp, synthetic construct
  misc_feature 1..2796: note = Nsp12 from SARS-CoV-2
  source 1..2796: mol_type = other DNA
agcgccgacgcccagagcttcctgaacagggtgtgcggcgtgagcgccgccaggctgaccccctgcggcaccggcaccagcaccgacgtggtgtacagggccttcgacatctacaacgacaaggtggccggcttcgccaagttcctgaagaccaactgctgcaggttccaggagaaggacgaggacgacaacctgatcgacagctacttcgtggtgaagaggcacaccttcagcaactaccagcacgaggagaccatctacaacctgctgaaggactgccccgccgtggccaagcacgacttcttcaagttcaggatcgacggcgacatggtgccccacatcagcaggcagaggctgaccaagtacaccatggccgacctggtgtacgccctgaggcacttcgacgagggcaactgcgacaccctgaaggagatcctggtgacctacaactgctgcgacgacgactacttcaacaagaaggactggtacgacttcgtggagaaccccgacatcctgagggtgtacgccaacctgggcgagagggtgaggcaggccctgctgaagaccgtgcagttctgcgacgccatgaggaacgccggcatcgtgggcgtgctgaccctggacaaccaggacctgaacggcaactggtacgacttcggcgacttcatccagaccacccccggcagcggcgtgcccgtggtggacagctactacagcctgctgatgcccatcctgaccctgaccagggccctgaccgccgagagccacgtggacaccgacctgaccaagccctacatcaagtgggacctgctgaagtacgacttcaccgaggagaggctgaagctgttcgacaggtacttcaagtactgggaccagacctaccaccccaactgcgtgaactgcctggacgacaggtgcatcctgcactgcgccaacttcaacgtgctgttcagcaccgtgttcccccccaccagcttcggccccctggtgaggaagatcttcgtggacggcgtgcccttcgtggtgagcaccggctaccacttcagggagctgggcgtggtgcacaaccaggacgtgaacctgcacagcagcaggctgagcttcaaggagctgctggtgtacgccgccgaccccgccatgcacgccgccagcggcaacctgctgctggacaagaggaccacctgcttcagcgtggccgccctgaccaacaacgtggccttccagaccgtgaagcccggcaacttcaacaaggacttctacgacttcgccgtgagcaagggcttcttcaaggagggcagcagcgtggagctgaagcacttcttcttcgcccaggacggcaacgccgccatcagcgactacgactactacaggtacaacctgcccaccatgtgcgacatcaggcagctgctgttcgtggtggaggtggtggacaagtacttcgactgctacgacggcggctgcatcaacgccaaccaggtgatcgtgaacaacctggacaagagcgccggcttccccttcaacaagtggggcaaggccaggctgtactacgacagcatgagctacgaggaccaggacgccctgttcgcctacaccaagaggaacgtgatccccaccatcacccagatgaacctgaagtacgccatcagcgccaagaacagggccaggaccgtggccggcgtgagcatctgcagcaccatgaccaacaggcagttccaccagaagctgctgaagagcatcgccgccaccaggggcgccaccgtggtgatcggcaccagcaagttctacggcggctggcacaacatgctgaagaccgtgtacagcgacgtggagaacccccacctgatgggctgggactaccccaagtgcgacagggccatgcccaacatgctgaggatcatggccagcctggtgctggccaggaagcacaccacctgctgcagcctgagccacaggttctacaggctggccaacgagtgcgcccaggtgctgagcgagatggtgatgtgcggcggcagcctgtacgtgaagcccggcggcaccagcagcggcgacgccaccaccgcctacgccaacagcgtgttcaacatctgccaggccgtgaccgccaacgtgaacgccctgctgagcaccgacggcaacaagatcgccgacaagtacgtgaggaacctgcagcacaggctgtacgagtgcctgtacaggaacagggacgtggacaccgacttcgtgaacgagttctacgcctacctgaggaagcacttcagcatgatgatcctgagcgacgacgccgtggtgtgcttcaacagcacctacgccagccagggcctggtggccagcatcaagaacttcaagagcgtgctgtactaccagaacaacgtgttcatgagcgaggccaagtgctggaccgagaccgacctgaccaagggcccccacgagttctgcagccagcacaccatgctggtgaagcagggcgacgactacgtgtacctgccctaccccgaccccagcaggatcctgggcgccggctgcttcgtggacgacatcgtgaagaccgacggcaccctgatgatcgagaggttcgtgagcctggccatcgacgcctaccccctgaccaagcaccccaaccaggagtacgccgacgtgttccacctgtacctgcagtacatcaggaagctgcacgacgagctgaccggccacatgctggacatgtacagcgtgatgctgaccaacgacaacaccagcaggtactgggagcccgagttctacgaggccatgtacaccccccacaccgtgctgcag

SEQ ID NO: 160 - DNA, 303 bp, Homo sapiens
  source 1..303: mol_type = genomic DNA
atgaacaggaaggtgaccgccatcgccctggccgccatcatctgggccaccgccgcccagggcttcctgatgttcaagcagggcaggtgcctgtgcatcggccccggcatgaaggccgtgaagatggccgagatcgagaaggccagcgtgatctaccccagcaacggctgcgacaaggtggaggtgatcgtgaccatgaaggcccacaagaggcagaggtgcctggaccccaggagcaagcaggccaggctgatcatgcaggccatcgagaagaagaacttcctgaggaggcagaacatgtga

SEQ ID NO: 161 - DNA, 465 bp, Homo sapiens
  source 1..465: mol_type = genomic DNA
atgaaggtctccgcggcagccctcgctgtcatcctcattgctactgccctctgcgctcctgcatctgcctccccatattcctcggacaccacaccctgctgctttgcctacattgcccgcccactgccccgtgcccacatcaaggagtatttctacaccagtggcaagtgctccaacccagcagtcgtccacaggtcaaggatgccaaagagagagggacagcaagtctggcaggatttcctgtatgactcccggctgaacaagggcaagctttgtcacccgaaagaaccgccaagtgtgtgccaacccagagaagaaatgggttcgggagtacatcaactctttggagatgagctaggatggagagtccttgaacctgaacttacacaaatttgcctgtttctgcttgctcttgtcctagcttgggaggcttcccctcactatcctaccccacccgctccttga

SEQ ID NO: 162 - DNA, 378 bp, Homo sapiens
  source 1..378: mol_type = genomic DNA
atgaagaaaagtggtgttcttttcctcttgggcatcatcttgctggttctgattggagtgcaaggaaccccagtagtgagaaagggtcgctgttcctgcatcagcaccaaccaagggactatccacctacaatccttgaaagaccttaaacaatttgccccaagcccttcctgcgagaaaattgaaatcattgctacactgaagaatggagttcaaacatgtctaaacccagattcagcagatgtgaaggaactgattaaaaagtgggagaaacaggtcagccaaaagaaaaagcaaaagaatgggaaaaaacatcaaaaaaagaaagttctgaaagttcgaaaatctcaacgttctcgtcaaaagaagactacataa

SEQ ID NO: 163 - DNA, 297 bp, Homo sapiens
  source 1..297: mol_type = genomic DNA
atgaatcaaactgccattctgatttgctgccttatctttctgactctaagtggcattcaaggagtacctctctctagaactgtacgctgtacctgcatcagcattagtaatcaacctgttaatccaaggtctttagaaaaacttgaaattattcctgcaagccaattttgtccacgtgttgagatcattgctacaatgaaaaagaagggtgagaagagatgtctgaatccagaatcgaaggccatcaagaatttactgaaagcagttagcaaggaaaggtctaaaagatctccttaa

SEQ ID NO: 164 - DNA, 300 bp, Homo sapiens
  source 1..300: mol_type = genomic DNA
atgaggctcctggcggccgcgctgctcctgctgctgctggcgctgtacaccgcgcgtgtggacgggtccaaatgcaagtgctcccggaagggacccaagatccgctacagcgacgtgaagaagctggaaatgaagccaaagtacccgcactgcgaggagaagatggttatcatcaccaccaagagcgtgtccaggtaccgaggtcaggagcactgcctgcaccccaagctgcagagcaccaagcgcttcatcaagtggtacaacgcctggaacgagaagcgcagggtctacgaagaatag

SEQ ID NO: 165 - DNA, 360 bp, Homo sapiens
  source 1..360: mol_type = genomic DNA
atgaaagttctaatctcttccctcctcctgttgctgccactaatgctgatgtccatggtctctagcagcctgaatccaggggtcgccagaggccacagggaccgaggccaggcttctaggagatggctccaggaaggcggccaagaatgtgagtgcaaagattggttcctgagagccccgagaagaaaattcatgacagtgtctgggctgccaaagaagcagtgcccctgtgatcatttcaagggcaatgtgaagaaaacaagacaccaaaggcaccacagaaagccaaacaagcattccagagcctgccagcaatttctcaaacaatgtcagctaagaagctttgctctgcctttgtag

SEQ ID NO: 166 - DNA, 453 bp, Homo sapiens
  source 1..453: mol_type = genomic DNA
atgaacctgtggctcctggcctgcctggtggccggcttcctgggagcctgggcccccgctgtccacacccaaggtgtctttgaggactgctgcctggcctaccactaccccattgggtgggctgtgctccggcgcgcctggacttaccggatccaggaggtgagcgggagctgcaatctgcctgctgcgatattctacctccccaagagacacaggaaggtgtgtgggaaccccaaaagcagggaggtgcagagagccatgaagctcctggatgctcgaaataaggtttttgcaaagctccaccacaacacgcagaccttccaagcaggccctcatgctgtaaagaagttgagttctggaaactccaagttatcatcgtccaagtttagcaatcccatcagcagcagtaagaggaatgtctccctcctgatatcagctaattcaggactgtga

SEQ ID NO: 167 - DNA, 384 bp, Homo sapiens
  source 1..384: mol_type = other DNA
atgcagcagagaggactcgccatcgtggccttggctgtctgtgcggccctacatgcctcagaagccatacttcccattgcctccagctgttgcacggaggtttcacatcatatttccagaaggctcctggaaagagtgaatatgtgtcgcatccagagagctgatggggattgtgacttggctgctgtcatccttcatgtcaagcgcagaagaatctgtgtcagcccgcacaaccatactgttaagcagtggatgaaagtgcaagctgccaagaaaaatggtaaaggaaatgtttgccacaggaagaaacaccatggcaagaggaacagtaacagggcacatcaggggaaacacgaaacatacggccataaaactccttattag

SEQ ID NO: 168 - DNA, 465 bp, Homo sapiens
  source 1..465: mol_type = genomic DNA
atgttccacgtgagcttcaggtacatcttcggcatcccccccctgatcctggtgctgctgcccgtgaccagcagcgagtgccacatcaaggacaaggagggcaaggcctacgagagcgtgctgatgatcagcatcgacgagctggacaagatgaccggcaccgacagcaactgccccaacaacgagcccaacttcttcaggaagcacgtgtgcgacgacaccaaggaggccgccttcctgaacagggccgccaggaagctgaagcagttcctgaagatgaacatcagcgaggagttcaacgtgcacctgctgaccgtgagccagggcacccagaccctggtgaactgcaccagcaaggaggagaagaacgtgaaggagcagaagaagaacgacgcctgcttcctgaagaggctgctgagggagatcaagacctgctggaacaagatcctgaagggcagcatctga

SEQ ID NO: 169 - DNA, 489 bp, Homo sapiens
  source 1..489: mol_type = genomic DNA
atgagaatttcgaaaccacatttgagaagtatttccatccagtgctacttgtgtttacttctaaacagtcattttctaactgaagctggcattcatgtcttcattttgggctgtttcagtgcagggcttcctaaaacagaagccaactgggtgaatgtaataagtgatttgaaaaaaattgaagatcttattcaatctatgcatattgatgctactttatatacggaaagtgatgttcaccccagttgcaaagtaacagcaatgaagtgctttctcttggagttacaagttatttcacttgagtccggagatgcaagtattcatgatacagtagaaaatctgatcatcctagcaaacaacagtttgtcttctaatgggaatgtaacagaatctggatgcaaagaatgtgaggaactggaggaaaaaaatattaaagaatttttgcagagttttgtacatattgtccaaatgttcatcaacacttcttga

SEQ ID NO: 170 - DNA, 462 bp, Homo sapiens
  source 1..462: mol_type = genomic DNA
atgtacaggatgcaactcctgtcttgcattgcactaagtcttgcacttgtcacaaacagtgcacctacttcaagttctacaaagaaaacacagctacaactggagcatttactgctggatttacagatgattttgaatggaattaataattacaagaatcccaaactcaccaggatgctcacatttaagttttacatgcccaagaaggccacagaactgaaacatcttcagtgtctagaagaagaactcaaacctctggaggaagtgctaaatttagctcaaagcaaaaactttcacttaagacccagggacttaatcagcaatatcaacgtaatagttctggaactaaagggatctgaaacaacattcatgtgtgaatatgctgatgagacagcaaccattgtagaatttctgaacagatggattaccttttgtcaaagcatcatctcaacactgacttga

SEQ ID NO: 171 - DNA, 1733 bp, synthetic construct
  misc_feature 1..1733: note = CAG promoter
  source 1..1733: mol_type = other DNA
ctcgacattgattattgactagttattaatagtaatcaattacggggtcattagttcatagcccatatatggagttccgcgttacataacttacggtaaatggcccgcctggctgaccgcccaacgacccccgcccattgacgtcaataatgacgtatgttcccatagtaacgccaatagggactttccattgacgtcaatgggtggagtatttacggtaaactgcccacttggcagtacatcaagtgtatcatatgccaagtacgccccctattgacgtcaatgacggtaaatggcccgcctggcattatgcccagtacatgaccttatgggactttcctacttggcagtacatctacgtattagtcatcgctattaccatggtcgaggtgagccccacgttctgcttcactctccccatctcccccccctccccacccccaattttgtatttatttattttttaattattttgtgcagcgatgggggcggggggggggggggggcgcgcgccaggcggggcggggcggggcgaggggcggggcggggcgaggcggagaggtgcggcggcagccaatcagagcggcgcgctccgaaagtttccttttatggcgaggcggcggcggcggcggccctataaaaagcgaagcgcgcggcgggcgggagtcgctgcgcgctgccttcgccccgtgccccgctccgccgccgcctcgcgccgcccgccccggctctgactgaccgcgttactcccacaggtgagcgggcgggacggcccttctcctccgggctgtaattagcgcttggtttaatgacggcttgtttcttttctgtggctgcgtgaaagccttgaggggctccgggagggccctttgtgcggggggagcggctcggggggtgcgtgcgtgtgtgtgtgcgtggggagcgccgcgtgcggctccgcgctgcccggcggctgtgagcgctgcgggcgcggcgcggggctttgtgcgctccgcagtgtgcgcgaggggagcgcggccgggggcggtgccccgcggtgcggggggggctgcgaggggaacaaaggctgcgtgcggggtgtgtgcgtgggggggtgagcagggggtgtgggcgcgtcggtcgggctgcaaccccccctgcacccccctccccgagttgctgagcacggcccggcttcgggtgcggggctccgtacggggcgtggcgcggggctcgccgtgccgggcggggggtggcggcaggtgggggtgccgggcggggcggggccgcctcgggccggggagggctcgggggaggggcgcggcggcccccggagcgccggcggctgtcgaggcgcggcgagccgcagccattgccttttatggtaatcgtgcgagagggcgcagggacttcctttgtcccaaatctgtgcggagccgaaatctgggaggcgccgccgcaccccctctagcgggcgcggggcgaagcggtgcggcgccggcaggaaggaaatgggcggggagggccttcgtgcgtcgccgcgccgccgtccccttctccctctccagcctcggggctgtccgcggggggacggctgccttcgggggggacggggcagggcggggttcggcttctggcgtgtgaccggcggctctagagcctctgctaaccatgttcatgccttcttctttttcctacagctcctgggcaacgtgctggttattgtgctgtctcatcattttggcaaagaattg

SEQ ID NO: 172 - DNA, 589 bp, synthetic construct
  misc_feature 1..589: note = CMV Promoter
  source 1..589: mol_type = other DNA
tagttattaatagtaatcaattacggggtcattagttcatagcccatatatggagttccgcgttacataacttacggtaaatggcccgcctggctgaccgcccaacgacccccgcccattgacgtcaataatgacgtatgttcccatagtaacgccaatagggactttccattgacgtcaatgggtggagtatttacggtaaactgcccacttggcagtacatcaagtgtatcatatgccaagtacgccccctattgacgtcaatgacggtaaatggcccgcctggcattatgcccagtacatgaccttatgggactttcctacttggcagtacatctacgtattagtcatcgctattaccatggtgatgcggttttggcagtacatcaatgggcgtggatagcggtttgactcacggggatttccaagtctccaccccattgacgtcaatgggagtttgttttggcaccaaaatcaacgggactttccaaaatgtcgtaacaactccgccccattgacgcaaatgggcggtaggcgtgtacggtgggaggtctatataagcagagctggtttagtgaaccgtcagatc

SEQ ID NO: 173 - DNA, 635 bp, Homo sapiens
  source 1..635: mol_type = other DNA; note = SP-B promoter
gtatagggctgtctgggagccactccagggccacagaaatcttgtctctgactcagggtattttgttttctgttttgtgtaaatgctcttctgactaatgcaaaccatgtgtccatagaaccagaagatttttccaggggaaaaggtaaggaggtggtgagagtgtcctgggtctgcccttccagggcttgccctgggttaagagccaggcaggaagctctcaagagcattgctcaagagtagagggggcctgggaggcccagggaggggatgggaggggaacacccaggctgcccccaaccagatgccctccaccctcctcaacctccctcccacggcctggagaggtgggaccaggtatggaggcttgagagcccctggttggaggaagccacaagtccaggaacatgggagtctgggcagggggcaaaggaggcaggaacaggccatcagccaggacaggtggtaaggcaggcaggagtgttcctgctgggaaaaggtgggatcaagcacctggagggctcttcagagcaaagacaaacactgaggtcgctgccactcctacagagcccccacgccccgcccagctataaggggccatgcaccaagcagggtacccaggctgcagaggtgcc

SEQ ID NO: 174 - DNA, 1559 bp, Homo sapiens
  source 1..1559: mol_type = other DNA; note = CD144 promoter
catccatgcccatggcctcagatgccagccataagctgttgggttccaaacctcgactccaggctggactcacccctgtctcccccaccagcctgacacctccacctgggtatctaacgagcatctcaaactcaacctgcctgagacagaggaatcactatcccctcctcctccaaaaatatccttccatcacactccccatcttgtgctctgatttactaaacggccctgggccctctctttctcagggtctctgcttgcccagctatataataaaacaagtttgggacttcccaaccattcacccatggaaaaacagaagcaactcttcaaaggacagattcccaggatctgccctgggagattccaaatcagttgatctggggtgagcccagtcctctgtagtttttagaagctcctcctatgtctctcctggtcagcagaatcttggcccctcccttccccccagcctcttggttcttctgggctctgatccagcctcagcgtcactgtcttccacgcccctctttgattctcgtttatgtcaaaagccttgtgaggatgaggctgtgattatccccattttacagatgaggaaactgtggctccaggatgacacaactggccagaggtcacatcagaagcagagctgggtcacttgactccacccaatatccctaaatgcaaacatcccctacagaccgaggctggcaccttagagctggagtccatgcccgctctgaccaggagaagccaacctggtcctccagagccaagagcttctgtccctttcccatctcctgaagcctccctgtcacctttaaagtccattcccacaaagacatcatgggatcaccacagaaaatcaagctctggggctaggctgaccccagctagatttttggctcttttataccccagctgggtggacaagcaccttaaacccgctgagcctcagcttcccgggctataaaatgggggtgatgacacctgcctgtagcattccaaggagggttaaatgtgatgctgcagccaagggtccccacagccaggctctttgcaggtgctgggttcagagtcccagagctgaggccgggagtaggggttcaagtggggtgccccaggcagggtccagtgccagccctctgtggagacagccatccggggccgaggcagccgcccaccgcagggcctgcctatctgcagccagcccagccctcacaaaggaacaataacaggaaaccatcccagggggaagtgggccagggccagctggaaaacctgaaggggaggcagccaggcctccctcgccagcggggtgtggctcccctccaaagacggtcggctgacaggctccacagagctccactcacgctcagccctggacggacaggcagtccaacggaacagaaacatccctcagcccacaggcacggtgagtgggggctcccacactcccctccaccccaaacccgccaccctgcgcccaagatgggagggtcctcagcttccccatctgtagaatgggcatcgtcccactcccatgacagagaggctcc

SEQ ID NO: 175 - DNA, 39 bp, synthetic construct
  misc_feature 1..39: note = wild type native leader sequence from Spike protein fromSARS-CoV-2
  source 1..39: mol_type = other DNA
atgttcgtgttcctggtgctgctgcccctggtgagcagc

SEQ ID NO: 176 - DNA, 63 bp, synthetic construct
  misc_feature 1..63: note = T2A Linker
  source 1..63: mol_type = other DNA
ggaagcggagagggcaggggaagtcttctaacatgcggggacgtggaggaaaatcccggcccc

SEQ ID NO: 177 - DNA, 69 bp, synthetic construct
  misc_feature 1..69: note = E2A Linker
  source 1..69: mol_type = other DNA
ggaagcggacagtgtactaattatgctctcttgaaattggctggagatgttgagagcaacccaggtccc

SEQ ID NO: 178 - DNA, 66 bp, synthetic construct
  misc_feature 1..66: note = P2A Linker
  source 1..66: mol_type = other DNA
ggaagcggagccacgaacttctctctgttaaagcaagcaggagatgttgaagaaaaccccgggcct

SEQ ID NO: 179 - skipped

SEQ ID NO: 180 - DNA, 15 bp, synthetic construct
  misc_feature 1..15: note = Linker
  source 1..15: mol_type = other DNA
ggccccggccccggc

SEQ ID NO: 181 - DNA, 18 bp, synthetic construct
  misc_feature 1..18: note = 6-His Tag
  source 1..18: mol_type = other DNA
catcaccatcaccatcac

SEQ ID NO: 182 - DNA, 1580 bp, synthetic construct
  misc_feature 1..1580: note = Nsp1, Nsp2,and Nsp3 from SARS-CoV-2
  source 1..1580: mol_type = other DNA
gacgtgctagtacgtggcttcggggactctgtggaagaggccctatcggaggcacgtgaacatcttaaaagtggcacttgtggcatagtagagctggaaaaaggcgtattgcctcagcttgaacagccctatgtgttcattaaacgatctgacgcccagggcactggtcatggccacaaggtctgtgagctagttgctgaattggatggcgttcagttcggtcgtagcggtataacactgggagtactcgtgccacacgttggcgagaccccaattgcataccgcactgttcttcttcgtaagaatggtaataagggagccggtggccatagctttggcatcgatctaaagtcatatgacttaggtgacgagcttggcactgatcccattgaagattatgaacaaaactggaacactaaacatggcagtggtgcccttcgtgaactcactcgtgagctcaatggaggagtagttactcgctatgtcgacaacaatttctgtggcccagatggctacccccttgaatgcattaaagaccttctcgctcgtgcgggcaagtcaatgtgcactctttctgaacaacttgattttatcgagtcgaagagaggtgtctactgctgtcgtgaacatgagcatgaaattgcttggtttaccgaacgctctgaaaagagctatgagcaccagacacccttcgagatcaagagtgccaagaaatttgacactttcaaaggggaatgcccaaagtttgtatttcctctcaattctagagtcaaagtcattcaaccacgtgttgaaaagaaaaagactgaaggtttcatggggcgtatacgctctgtgtaccctgttgcatcccctggggattgtaacgatatgcacttgtctaccttgatgaaatgtaatcattgtgatgaagtttcatggcagacgtgcgactttctcaaagccacttgtgaacaatgtggcactgaaaacttagtctgtgaaggacccactacatgtggatacctacctactaatgctgtacttaaaatgccttgtcctgcttgtcaagatccagagattggacctgagcatagtgttgcagactatcacaaccactcaaacattgaaactcgactccgcaagggaggtaggactaaatgttttggtgggtgtgtgtttgcctacgttggctgctataacaagcgtgcctactgggttcctcgtgctagtgccgatattggtgcaaaccatactggcattactggagacaatgtggagactttaaatgaagatctcctggagatactgcatcgtgaacgtgttaatgttaacattgttggcgattttcagttgaatgaagaggttgctattattctagcatctttctctgcttctactagtgcctttattgacactgtaaagggccttgactacaagaccttcaaagccattgttgaatcctgtggaaactacaaagttaccaaaggaaaacctgtccaaggagcttggaacattggccagcaaaaatctattttgacaccgctgtgtggttttccatcacaggctgccagtgtcattagatcaatcttttctcgcac

SEQ ID NO: 183 - DNA, 3550 bp, synthetic construct
  misc_feature 1..3550: note = Nsp5, Nsp6, Nsp7, Nsp8, Nsp9, Nsp10, Nsp11, Nsp12, Nsp13, Nsp14,Nsp15,and Nsp16 from SARS-CoV-2
  source 1..3550: mol_type = other DNA
aaaattaaggcttgcatcgaagaggtcactacaacactggaagagactaagtttcttaccaataagttgcttctttttgctgatatcagcggtaaactttaccaagattctcagaatatgcttagaggtgaggacgtgtctttccttgagagagatgcgccttacatggtaggtgatgttatcaatagtggtgatattacctgcgttgtaataccttctaagaaggctggtggtactacagaaatgcttgcaagagcattgaagaaagtgccarttgatgagtatataaccacataycctggwcaaggwtgtgctggttatacacttgakgaagctargactgctcttaaraartgcaaatctgcaytktaygtkttaccttcagaatcacctaatgctaaggaagagattctaggaaccgtatcttggaatttgagagaaatgcttgctcacgctgaagagacaagaaaattaatgcctatctgcatggatgtcagagccataatggccaccatccaacgcaagtacaaaggaattaaaattcaagaaggcatcgttgactatggtgtccgattcttcttttatactagtaaagagcctgtagcttctattattacgaagctgaactctctaaatgagccacttgtcacaatgccaattggttatgtgacacatggttttaatcttgaagaggctgcgcgctgtatgcgttctcttaaagctcctgccgtagtgtcagtatcatcaccagatgcygttactacatataatggatacctcacttcgtcatcaaagacatctgaggagcactttgtggaaacagtttctttggctggctcttacagagattggtcctattcaggacagcgtacagagttaggtgttgaatttcttaagcgtggtgacaaaattgtgtaccacactttggagagccccgtcaagttccatcttgacggtgaggttcttccacttgacaaattaaagagtctcttatccctacgggaggttaagactataaaagtgttcacaactgtggacaatactaatctccacacacatcttgtggatatgtctatgacatatggacagcagtttggtccaacatatttggatggtgctgatgttacaaaaattaaacctcatgtaaatcatgagggtaagactttctttgtattacctagtgatgacacactacgtagtgaagcttttgagtactaccacgctcttgatgagagtttccttggtagatacatgtctgctttaaaccacacaaagaaatggaaattccctcaagttggtggtttgacttccattaagtgggctgataacaattgttatttgtctagtgttttattagcacttcaacaaattgaagttaaatttaatgccccagcactacaagaagcttactatagagctcgtgctggtgatgctgctaatttttgtgcacttatactcgcttacagtaataaaactgttggcgagctgggtgatgtcagagaaactatggcccatcttttacagcatgctaatttggaatctgcaaagcgagttcttaatgtggtgtgtaaacattgcggccagaaaactactaccttaacgggtgtagaggctgtgatgtacatgggtactctgtcttatgataatcttaagacaggtgtttctgttccatgtgtgtgtggtcgtgacgctacacaatatttagtacaacaagagtcttcttttgttatgatgtccgcaccacctgctgaatataaattacagcaaggtacattcttatgtgcaaatgaatacactggtaattatcagtgtggtcattacactcatataactgctaaggagaccctctatcgtattgatggagctcaccttacaaagatgtcagagtataaagggccagtgactgatgtgttctacaaggaaacatcttacactacaaccatcaagcctgtgtcatataaactcgatggagttacttacacagagattgaaccaaaattggatgggtattataaaaaggataatgcttactatacggagcagcctatagaccttgtaccaactcaaccactaccaaatgcgagttttgataatttcaaactcacatgttctaatataaaattcgctgatgatttaaatcaaatgacaggcttcacaaagccagcttcacgagagctatctgtcacattctttccagacttgaatggcgatgtagtggctattgactatagacactactcagcgagtttcaagaaaggtgctagattactgcataagccaattgtttggcatatcaatcaggctacaaccaagacaacgttcagaccaaacacttggtgtttacgttgtctttggagtacaaaaccagtagatacttcaaattcatttgaagttctggcagtagaagacacacaaggaatggacaatcttgcttgtgaaagtcaaagacccacctctgaagaagtagtggaaaatcctaccatacagaaggaagtcatagagtgtgacgtgaaaactaccgaagttgtaggcaatgtcatacttaaaccatcagatgaaggtgttaaagtaacacaagagttagggcatgaggatcttatggctgcctatgtggaaaatacaagcattaccattaagaaacctaatgagctttcattagccttaggtttaaaaacaattgccactcatggtattgctgcaattaacagtgttccgtggagtaaaattttggcttatgtcagaccattcctaggacgaacagcaatcacaacatcaaactgtgctaagagattagtacagcgtgtatttaacaactacatgccctatgtgcttacattattgttccaattgtgtacttttaccaaaagtacaaattctagaattagagcttcactacctacgactattgctaaaaatagtgttaagggtgttgctaaattatgtttggatgctggcatcaattatgtaaagtcacccaaattttctaaattgttcactattgcaatgtggctattattgttaagcatttgcttaggttcactaatctatgtaactgcagctttaggtgtattattgtccaactttggagctccttcctattgtagtggcgttagagaatcgtatctcaattcctctaatgttactactatggacttctgtgaaggttcttttccttgcagcgtttgtttaagtggattagactcgcttgattcctatccagctcttgaaaccatacaggtaacgatttcatcgtataagctagacttgacaattttaggtctggctgctgagtggtttttggcatatatgttgttcacaaaattcttttatttattaggtctttcagctataatgcaggtgttctttggctattttgctagtcatttcatcagcaattcttggcttatgtggtttatcattagtatcgtacaaatggcacccgtttccgcaatggttaggatgtacattttcgttgcttctttctactacatatggaagagctatgttcatattatggatggttgtacttcatctacttgcatgatgtgct

SEQ ID NO: 184 - DNA, 2099 bp, synthetic construct
  misc_feature 1..2099: note = spike glycoprotein from SARS-CoV-2
  source 1..2099: mol_type = other DNA
taccaagctactagagtagtggtactttcatttgagcttctaaatgcacctgccacagtgtgtggaccaaaattgtccacatcactaattaagaaccagtgtgtcaattttaatttcaatggactcaagggtactggtgtgttgactgactcgtccaaaaagtttcagtcttttcaacaatttggaagggatgcatctgattttactgactcagtacgcgaccctcagacacttcaaatacttgacatttcaccatgttcatttggtggtgtgagtgtaataacaccaggaacaaatgcttcatctgaagtagccgttctataccaagatgtaaactgcactgatgttcccacggccatacgtgctgaccaactcacacctgcttggcgtgtttactctgctggagtaaatgtgtttcaaactcaggctggctgtttaataggagcggaacatgtcaatgcttcatatgagtgtgacattcccattggtgcaggcatttgtgctagttaccatacagcttcccttttacgtaatacaggccagaaatcaattgtggcctatactatgtcacttggtgctgaaaactcaattgcttatgctaataactcaattgccatacctacaaatttttcaatcagtgtcacaactgaagtgatgcctgtttcaatggctaagacatcagtagattgtacaatgtacatctgtggtgactctcaggagtgcagcaacttactacttcagtatggtagcttttgcacacaattaaatcgtgccctttcaggcattgctgttgaacaggacaaaaacactcaagaggtttttgcccaagttaaacaaatgtataagacaccagccataaaagattttggtggctttaatttctcacaaatattgcctgacccttctaagccaacaaaaagatcatttattgaggatttactcttcaacaaagtgactctcgctgatgctggctttatgaagcaatacggcgaatgcctaggcgatattagtgctagagatctcatttgtgcgcagaagttcaatggactcactgtccttccacctctactcacggatgaaatgattgctgcttacaccgccgctcttgtcagcggtactgctactgctggttggacatttggtgcaggtgctgctctacaaataccttttgctatgcaaatggcttataggttcaatggcattggagttactcaaaatgttctctatgagaaccagaagcagatcgctaaccaatttaacaaggcgatcagtcaaattcaagaatcacttactactacttcaactgcattgggcaagctgcaagacgtcgtcaaccagaatgctcaagcattgaacacacttgttaaacaactaagttctaactttggtgcaatttcaagtgttttaaatgacattctgtctcgactygacaaagttgaggctgaagtgcaaattgataggttgattactggcagattacaaagccttcagacctatgtaacacaacaactaatcagagctgctgaaatcagagcttctgccaatcttgctgccactaagatgtccgagtgtgttcttggacaatcaaaaagagttgacttttgtggaaaaggctatcatcttatgtctttccctcaagcagccccacatggtgtcgtcttcttacatgtcacatacgtgccatcgcaagaaagaaacttcaccactgccccagcaatctgccatcaaggcaaggcacacttccctcgtgaaggtgtttttgtatctaatggcacttcttggtttatcacacagaggaacttcttttcaccacaaataattacaacagacaatacatttgtctctggaaattgtgatgtcgttattggcatcatcaacaatactgtttatgatcctctgcaacctgagcttgactcatttaaagaagagctggacaagtacttcaaaaaccacacgtcacctgatgtrgatcttggcgacatctcaggcattaatgcttcagtcgtcaatattcaaaaagaaattgaccgcctcaatgaggttgccaaaaatctaaatgaatcgctcatcgatcttcaagaacttggaaaatatgagca

SEQ ID NO: 185 - DNA, 1229 bp, synthetic construct
  misc_feature 1..1229: note = ORF3a, Envelope (E), Membrane (M), ORF6, and ORF7a fromSARS-CoV-2
  source 1..1229: mol_type = other DNA
cagtaacacttgcttgctttgtgcttgctgctgtttacagaattaattgggtgactggcggaattgcrattgcaatggcttgtattgtaggcttgatgtggcttagctacttcrttgcttctttcaggctgtttgcgcgcacccgctcwatgtggtcattcaacccagaaacyaacattcttctcaatgtgcctcttcgrggracaatyttgaccagaccgctcatggaragtgaacttgtcattggtgctgtgatcattcgtggtcacctgcgaatggctggacactcyctwgggcgctgtgacattaaggacctgccaaaagagatcactgtggctacatcacgaacgctttcttattacaaattaggagcttcgcagcgtgtaggcactgactcaggttttgctgcatacaaccgctaccgtattggaaactacaaattaaatacagaccacgccggtagcaacgacaatattgctttgctagtacagtaagtgacaacagatgtttcatctagttgacttccaggttacaatagcggagatattgattatcattatgaggactttcaggattgccatctggaatcttgatgtaataataagttcaatagtgagacaattatttaagcctctaactaagaagaattattctgagttagatgatgaagaacytatggagattgattatccataaaacgaacatgaaaattatcctcttcctgactttgatttcacttgcattttgtgagttatatcattatcaggagtgtgttagaggtacaactgtactattaaaagaaccttgcccatcrggaacgtacgagggcaattcaccatttcaccctcttgctgacaacaaatttgcactaacttgcattagcacacattttgcttttgcttgtgctgacggtactcgacatacctatcagcttcgtgcaagatcagtttctccaaaactcttcatcaggcaagaggaatttcatcaagagctctattcaccactttttctcattgttgccgctctagtatttataatactttgcttcaccattaagagaaagaccgaatgagtgagctcactttaattgacttctatttgtgctttttagcctttctgctattccttgttttaataatgctcatcatattttggttctccttggagattcaagattctgaagagccatgtccaaaagtctaaacgaacatgaaacttctcattgtttt

SEQ ID NO: 186 - protein, 292 aa, synthetic construct
  REGION 1..292: note = SARS-CoV-like Spike-S1-NTD
SQCVNLTTRTQLPPAYTNSFTRGVYYPDKVFRSSVLHSTQDLFLPFFSNVTWFHAIHVSGTNGTKRFDNPVLPFNDGVYFASTEKSNIIRGWIFGTTLDSKTQSLLIVNNATNVVIKVCEFQFCNDPFLGVYYHKNNKSWMESEFRVYSSANNCTFEYVSQPFLMDLEGKQGNFKNLREFVFKNIDGYFKIYSKHTPINLVRDLPQGFSALEPLVDLPIGINITRFQTLLALHRSYLTPGDSSSGWTAGAAAYYVGYLQPRTFLLKYNENGTITDAVDCALDPLSETKCTLK

SEQ ID NO: 187 - protein, 223 aa, synthetic construct
  REGION 1..223: note = SARS-CoV-2 Spike-S1-RBD
RVQPTESIVRFPNITNLCPFGEVFNATRFASVYAWNRKRISNCVADYSVLYNSASFSTFKCYGVSPTKLNDLCFTNVYADSFVIRGDEVRQIAPGQTGKIADYNYKLPDDFTGCVIAWNSNNLDSKVGGNYNYLYRLFRKSNLKPFERDISTEIYQAGSTPCNGVEGFNCYFPLQSYGFQPTNGVGYQPYRVVVLSFELLHAPATVCGPKKSTNLVKNKCVNF

SEQ ID NO: 188 - protein, 666 aa, synthetic construct
  REGION 1..666: note = CoV Spike S1-S2_S2
FNGLTGTGVLTESNKKFLPFQQFGRDIADTTDAVTRAGCLIGAEHVNNSYECDIPIGAGICASYQTQTNRDPQTLEILDITPCSFGGVSVITPGTNTSNQVAVLYQDVNCTEVPVAIHADQLTPTWRVYSTGSNVFQSPRRARSVASQSIIAYTMSLGAENSVAYSNNSIAIPTNFTISVTTEILPVSMTKTSVDCTMYICGDSTECSNLLLQYGSFCTQLNRALTGIAVEQDKNTQEVFAQVKQIYKTPPIKDFGGFNFSQILPDPSKPSKRSFIEDLLFNKVTLADAGFIKQYGDCLGDIAARDLICAQKFNGLTVLPPLLTDEMIAQYTSALLAGTITSGWTFGAGAALQIPFAMQMAYRFNGIGVTQNVLYENQKLIANQFNSAIGKIQDSLSSTASALGKLQDVVNQNAQALNTLVKQLSSNFGAISSVLNDILSRLDKVEAEVQIDRLITGRLQSLQTYVTQQLIRAAEIRASANLAATKMSECVLGQSKRVDFCGKGYHLMSFPQSAPHGVVFLHVTYVPAQEKNFTTAPAICHDGKAHFPREGVFVSNGTHWFVTQRNFYEPQIITTDNTFVSGNCDVVIGIVNNTVYDPLQPELDSFKEELDKYFKNHTSPDVDLGDISGINASVVNIQKEIDRLNEVAKNLNESLIDLQELGKYEQ

SEQ ID NO: 189 - protein, 1273 aa, synthetic construct
  REGION 1..1273: note = spike glycoprotein with 682-QQAQ-685 mutation in the S1-S2 fromSARS-CoV-2
MFVFLVLLPLVSSQCVNLTTRTQLPPAYTNSFTRGVYYPDKVFRSSVLHSTQDLFLPFFSNVTWFHAIHVSGTNGTKRFDNPVLPFNDGVYFASTEKSNIIRGWIFGTTLDSKTQSLLIVNNATNVVIKVCEFQFCNDPFLGVYYHKNNKSWMESEFRVYSSANNCTFEYVSQPFLMDLEGKQGNFKNLREFVFKNIDGYFKIYSKHTPINLVRDLPQGFSALEPLVDLPIGINITRFQTLLALHRSYLTPGDSSSGWTAGAAAYYVGYLQPRTFLLKYNENGTITDAVDCALDPLSETKCTLKSFTVEKGIYQTSNFRVQPTESIVRFPNITNLCPFGEVFNATRFASVYAWNRKRISNCVADYSVLYNSASFSTFKCYGVSPTKLNDLCFTNVYADSFVIRGDEVRQIAPGQTGKIADYNYKLPDDFTGCVIAWNSNNLDSKVGGNYNYLYRLFRKSNLKPFERDISTEIYQAGSTPCNGVEGFNCYFPLQSYGFQPTNGVGYQPYRVVVLSFELLHAPATVCGPKKSTNLVKNKCVNFNFNGLTGTGVLTESNKKFLPFQQFGRDIADTTDAVTRAGCLIGAEHVNNSYECDIPIGAGICASYQTQTNRDPQTLEILDITPCSFGGVSVITPGTNTSNQVAVLYQDVNCTEVPVAIHADQLTPTWRVYSTGSNVFQSPQQAQSVASQSIIAYTMSLGAENSVAYSNNSIAIPTNFTISVTTEILPVSMTKTSVDCTMYICGDSTECSNLLLQYGSFCTQLNRALTGIAVEQDKNTQEVFAQVKQIYKTPPIKDFGGFNFSQILPDPSKPSKRSFIEDLLFNKVTLADAGFIKQYGDCLGDIAARDLICAQKFNGLTVLPPLLTDEMIAQYTSALLAGTITSGWTFGAGAALQIPFAMQMAYRFNGIGVTQNVLYENQKLIANQFNSAIGKIQDSLSSTASALGKLQDVVNQNAQALNTLVKQLSSNFGAISSVLNDILSRLDKVEAEVQIDRLITGRLQSLQTYVTQQLIRAAEIRASANLAATKMSECVLGQSKRVDFCGKGYHLMSFPQSAPHGVVFLHVTYVPAQEKNFTTAPAICHDGKAHFPREGVFVSNGTHWFVTQRNFYEPQIITTDNTFVSGNCDVVIGIVNNTVYDPLQPELDSFKEELDKYFKNHTSPDVDLGDISGINASVVNIQKEIDRLNEVAKNLNESLIDLQELGKYEQYIKWPWYIWLGFIAGLIAIVMVTIMLCCMTSCCSCLKGCCSCGSCCKFDEDDSEPVLKGVKLHYT

SEQ ID NO: 190 - protein, 1273 aa, synthetic construct
  REGION 1..1273: note = spike glycoprotein with two proline substitutions (K986P, V987P)
MFVFLVLLPLVSSQCVNLTTRTQLPPAYTNSFTRGVYYPDKVFRSSVLHSTQDLFLPFFSNVTWFHAIHVSGTNGTKRFDNPVLPFNDGVYFASTEKSNIIRGWIFGTTLDSKTQSLLIVNNATNVVIKVCEFQFCNDPFLGVYYHKNNKSWMESEFRVYSSANNCTFEYVSQPFLMDLEGKQGNFKNLREFVFKNIDGYFKIYSKHTPINLVRDLPQGFSALEPLVDLPIGINITRFQTLLALHRSYLTPGDSSSGWTAGAAAYYVGYLQPRTFLLKYNENGTITDAVDCALDPLSETKCTLKSFTVEKGIYQTSNFRVQPTESIVRFPNITNLCPFGEVFNATRFASVYAWNRKRISNCVADYSVLYNSASFSTFKCYGVSPTKLNDLCFTNVYADSFVIRGDEVRQIAPGQTGKIADYNYKLPDDFTGCVIAWNSNNLDSKVGGNYNYLYRLFRKSNLKPFERDISTEIYQAGSTPCNGVEGFNCYFPLQSYGFQPTNGVGYQPYRVVVLSFELLHAPATVCGPKKSTNLVKNKCVNFNFNGLTGTGVLTESNKKFLPFQQFGRDIADTTDAVRDPQTLEILDITPCSFGGVSVITPGTNTSNQVAVLYQDVNCTEVPVAIHADQLTPTWRVYSTGSNVFQTRAGCLIGAEHVNNSYECDIPIGAGICASYQTQTNSPRRARSVASQSIIAYTMSLGAENSVAYSNNSIAIPTNFTISVTTEILPVSMTKTSVDCTMYICGDSTECSNLLLQYGSFCTQLNRALTGIAVEQDKNTQEVFAQVKQIYKTPPIKDFGGFNFSQILPDPSKPSKRSFIEDLLFNKVTLADAGFIKQYGDCLGDIAARDLICAQKFNGLTVLPPLLTDEMIAQYTSALLAGTITSGWTFGAGAALQIPFAMQMAYRFNGIGVTQNVLYENQKLIANQFNSAIGKIQDSLSSTASALGKLQDVVNQNAQALNTLVKQLSSNFGAISSVLNDILSRLDPPEAEVQIDRLITGRLQSLQTYVTQQLIRAAEIRASANLAATKMSECVLGQSKRVDFCGKGYHLMSFPQSAPHGVVFLHVTYVPAQEKNFTTAPAICHDGKAHFPREGVFVSNGTHWFVTQRNFYEPQIITTDNTFVSGNCDVVIGIVNNTVYDPLQPELDSFKEELDKYFKNHTSPDVDLGDISGINASVVNIQKEIDRLNEVAKNLNESLIDLQELGKYEQYIKWPWYIWLGFIAGLIAIVMVTIMLCCMTSCCSCLKGCCSCGSCCKFDEDDSEPVLKGVKLHYT

SEQ ID NO: 191 - protein, 1273 aa, synthetic construct
  REGION 1..1273: note = spike glycoprotein with four proline substitutions(F817P,A892P, A899P, A942P)
MFVFLVLLPLVSSQCVNLTTRTQLPPAYTNSFTRGVYYPDKVFRSSVLHSTQDLFLPFFSNVTWFHAIHVSGTNGTKRFDNPVLPFNDGVYFASTEKSNIIRGWIFGTTLDSKTQSLLIVNNATNVVIKVCEFQFCNDPFLGVYYHKNNKSWMESEFRVYSSANNCTFEYVSQPFLMDLEGKQGNFKNLREFVFKNIDGYFKIYSKHTPINLVRDLPQGFSALEPLVDLPIGINITRFQTLLALHRSYLTPGDSSSGWTAGAAAYYVGYLQPRTFLLKYNENGTITDAVDCALDPLSETKCTLKSFTVEKGIYQTSNFRVQPTESIVRFPNITNLCPFGEVFNATRFASVYAWNRKRISNCVADYSVLYNSASFSTFKCYGVSPTKLNDLCFTNVYADSFVIRGDEVRQIAPGQTGKIADYNYKLPDDFTGCVIAWNSNNLDSKVGGNYNYLYRLFRKSNLKPFERDISTEIYQAGSTPCNGVEGFNCYFPLQSYGFQPTNGVGYQPYRVVVLSFELLHAPATVCGPKKSTNLVKNKCVNFNFNGLTGTGVLTESNKKFLPFQQFGRDIADTTDAVTRAGCLIGAEHVNNSYECDIPIGAGICASYQTQTNRDPQTLEILDITPCSFGGVSVITPGTNTSNQVAVLYQDVNCTEVPVAIHADQLTPTWRVYSTGSNVFQSPRRARSVASQSIIAYTMSLGAENSVAYSNNSIAIPTNFTISVTTEILPVSMTKTSVDCTMYICGDSTECSNLLLQYGSFCTQLNRALTGIAVEQDKNTQEVFAQVKQIYKTPPIKDFGGFNFSQILPDPSKPSKRSPIEDLLFNKVTLADAGFIKQYGDCLGDIAARDLICAQKFNGLTVLPPLLTDEMIAQYTSALLAGTITSGWTFGAGPALQIPFPMQMAYRFNGIGVTQNVLYENQKLIANQFNSAIGKIQDSLSSTPSALGKLQDVVNQNAQALNTLVKQLSSNFGAISSVLNDILSRLDKVEAEVQIDRLITGRLQSLQTYVTQQLIRAAEIRASANLAATKMSECVLGQSKRVDFCGKGYHLMSFPQSAPHGVVFLHVTYVPAQEKNFTTAPAICHDGKAHFPREGVFVSNGTHWFVTQRNFYEPQIITTDNTFVSGNCDVVIGIVNNTVYDPLQPELDSFKEELDKYFKNHTSPDVDLGDISGINASVVNIQKEIDRLNEVAKNLNESLIDLQELGKYEQYIKWPWYIWLGFIAGLIAIVMVTIMLCCMTSCCSCLKGCCSCGSCCKFDEDDSEPVLKGVKLHYT

SEQ ID NO: 192 - protein, 1273 aa, synthetic construct
  REGION 1..1273: note = spike glycoprotein with six proline substitutions(F817P, A892P,A899P, A942P, K986P, V987P)
MFVFLVLLPLVSSQCVNLTTRTQLPPAYTNSFTRGVYYPDKVFRSSVLHSTQDLFLPFFSNVTWFHAIHVSGTNGTKRFDNPVLPFNDGVYFASTEKSNIIRGWIFGTTLDSKTQSLLIVNNATNVVIKVCEFQFCNDPFLGVYYHKNNKSWMESEFRVYSSANNCTFEYVSQPFLMDLEGKQGNFKNLREFVFKNIDGYFKIYSKHTPINLVRDLPQGFSALEPLVDLPIGINITRFQTLLALHRSYLTPGDSSSGWTAGAAAYYVGYLQPRTFLLKYNENGTITDAVDCALDPLSETKCTLKSFTVEKGIYQTSNFRVQPTESIVRFPNITNLCPFGEVFNATRFASVYAWNRKRISNCVADYSVLYNSASFSTFKCYGVSPTKLNDLCFTNVYADSFVIRGDEVRQIAPGQTGKIADYNYKLPDDFTGCVIAWNSNNLDSKVGGNYNYLYRLFRKSNLKPFERDISTEIYQAGSTPCNGVEGFNCYFPLQSYGFQPTNGVGYQPYRVVVLSFELLHAPATVCGPKKSTNLVKNKCVNFNFNGLTGTGVLTESNKKFLPFQQFGRDIADTTDAVTRAGCLIGAEHVNNSYECDIPIGAGICASYQTQTNRDPQTLEILDITPCSFGGVSVITPGTNTSNQVAVLYQDVNCTEVPVAIHADQLTPTWRVYSTGSNVFQSPRRARSVASQSIIAYTMSLGAENSVAYSNNSIAIPTNFTISVTTEILPVSMTKTSVDCTMYICGDSTECSNLLLQYGSFCTQLNRALTGIAVEQDKNTQEVFAQVKQIYKTPPIKDFGGFNFSQILPDPSKPSKRSPIEDLLFNKVTLADAGFIKQYGDCLGDIAARDLICAQKFNGLTVLPPLLTDEMIAQYTSALLAGTITSGWTFGAGPALQIPFPMQMAYRFNGIGVTQNVLYENQKLIANQFNSAIGKIQDSLSSTPSALGKLQDVVNQNAQALNTLVKQLSSNFGAISSVLNDILSRLDPPEAEVQIDRLITGRLQSLQTYVTQQLIRAAEIRASANLAATKMSECVLGQSKRVDFCGKGYHLMSFPQSAPHGVVFLHVTYVPAQEKNFTTAPAICHDGKAHFPREGVFVSNGTHWFVTQRNFYEPQIITTDNTFVSGNCDVVIGIVNNTVYDPLQPELDSFKEELDKYFKNHTSPDVDLGDISGINASVVNIQKEIDRLNEVAKNLNESLIDLQELGKYEQYIKWPWYIWLGFIAGLIAIVMVTIMLCCMTSCCSCLKGCCSCGSCCKFDEDDSEPVLKGVKLHYT

SEQ ID NO: 193 - protein, 1273 aa, synthetic construct
  REGION 1..1273: note = spike glycoprotein with six proline substitutions(F817P, A892P,A899P, A942P, K986P, V987P) and a 682-QQAQ-685 mutation
MFVFLVLLPLVSSQCVNLTTRTQLPPAYTNSFTRGVYYPDKVFRSSVLHSTQDLFLPFFSNVTWFHAIHVSGTNGTKRFDNPVLPFNDGVYFASTEKSNIIRGWIFGTTLDSKTQSLLIVNNATNVVIKVCEFQFCNDPFLGVYYHKNNKSWMESEFRVYSSANNCTFEYVSQPFLMDLEGKQGNFKNLREFVFKNIDGYFKIYSKHTPINLVRDLPQGFSALEPLVDLPIGINITRFQTLLALHRSYLTPGDSSSGWTAGAAAYYVGYLQPRTFLLKYNENGTITDAVDCALDPLSETKCTLKSFTVEKGIYQTSNFRVQPTESIVRFPNITNLCPFGEVFNATRFASVYAWNRKRISNCVADYSVLYNSASFSTFKCYGVSPTKLNDLCFTNVYADSFVIRGDEVRQIAPGQTGKIADYNYKLPDDFTGCVIAWNSNNLDSKVGGNYNYLYRLFRKSNLKPFERDISTEIYQAGSTPCNGVEGFNCYFPLQSYGFQPTNGVGYQPYRVVVLSFELLHAPATVCGPKKSTNLVKNKCVNFNFNGLTGTGVLTESNKKFLPFQQFGRDIADTTDAVTRAGCLIGAEHVNNSYECDIPIGAGICASYQTQTNRDPQTLEILDITPCSFGGVSVITPGTNTSNQVAVLYQDVNCTEVPVAIHADQLTPTWRVYSTGSNVFQSPQQAQSVASQSIIAYTMSLGAENSVAYSNNSIAIPTNFTISVTTEILPVSMTKTSVDCTMYICGDSTECSNLLLQYGSFCTQLNRALTGIAVEQDKNTQEVFAQVKQIYKTPPIKDFGGFNFSQILPDPSKPSKRSPIEDLLFNKVTLADAGFIKQYGDCLGDIAARDLICAQKFNGLTVLPPLLTDEMIAQYTSALLAGTITSGWTFGAGPALQIPFPMQMAYRFNGIGVTQNVLYENQKLIANQFNSAIGKIQDSLSSTPSALGKLQDVVNQNAQALNTLVKQLSSNFGAISSVLNDILSRLDPPEAEVQIDRLITGRLQSLQTYVTQQLIRAAEIRASANLAATKMSECVLGQSKRVDFCGKGYHLMSFPQSAPHGVVFLHVTYVPAQEKNFTTAPAICHDGKAHFPREGVFVSNGTHWFVTQRNFYEPQIITTDNTFVSGNCDVVIGIVNNTVYDPLQPELDSFKEELDKYFKNHTSPDVDLGDISGINASVVNIQKEIDRLNEVAKNLNESLIDLQELGKYEQYIKWPWYIWLGFIAGLIAIVMVTIMLCCMTSCCSCLKGCCSCGSCCKFDEDDSEPVLKGVKLHYT

SEQ ID NO: 194 - protein, 9 aa, Homo sapiens
KSYGFQPTY

SEQ ID NO: 195 - protein, 9 aa, Homo sapiens
VVGNHKYRF

SEQ ID NO: 196 - protein, 9 aa, Homo sapiens
YQVGNKPCK

SEQ ID NO: 197 - protein, 9 aa, Homo sapiens
CVIAWNSKK

SEQ ID NO: 198 - protein, 9 aa, Homo sapiens
KGAKGLNCY

SEQ ID NO: 199 - protein, 9 aa, Homo sapiens
SQCVNFTTR

SEQ ID NO: 200 - protein, 9 aa, Homo sapiens
NIADYNYKL

SEQ ID NO: 201 - protein, 9 aa, Homo sapiens
YLPLKSYGF

SEQ ID NO: 202 - protein, 9 aa, synthetic construct
KCYGVSLNK

SEQ ID NO: 203 - protein, 9 aa, Homo sapiens
IYKTPPIKY

SEQ ID NO: 204 - protein, 9 aa, Homo sapiens
CVADYSFLY

SEQ ID NO: 205 - protein, 9 aa, Homo sapiens
SVYAWDRRK

SEQ ID NO: 206 - protein, 9 aa, Homo sapiens
RFFRKSNLK

SEQ ID NO: 207 - protein, 9 aa, Homo sapiens
DISTEIYQV

SEQ ID NO: 208 - protein, 9 aa, Homo sapiens
YQPHRVVVL

SEQ ID NO: 209 - protein, 9 aa, Homo sapiens
FVIRGDQVK

SEQ ID NO: 210 - protein, 9 aa, Homo sapiens
NATKFSSVY

SEQ ID NO: 211 - protein, 9 aa, Homo sapiens
NLCPFSEIF

SEQ ID NO: 212 - protein, 9 aa, Homo sapiens
ASATVCGPK

SEQ ID NO: 213 - protein, 9 aa, Homo sapiens
KINNCVADY

SEQ ID NO: 214 - protein, 8 aa, Homo sapiens
KSYGFQPT

SEQ ID NO: 215 - protein, 8 aa, Homo sapiens
VVGNHKYR

SEQ ID NO: 216 - protein, 8 aa, Homo sapiens
YQVGNKPC

SEQ ID NO: 217 - protein, 8 aa, Homo sapiens
CVIAWNSK

SEQ ID NO: 218 - protein, 8 aa, Homo sapiens
KGAKGLNC

SEQ ID NO: 219 - protein, 8 aa, synthetic construct
SQCVNFTT

SEQ ID NO: 220 - protein, 8 aa, Homo sapiens
NIADYNYK

SEQ ID NO: 221 - protein, 8 aa, Homo sapiens
YLPLKSYG

SEQ ID NO: 222 - protein, 8 aa, Homo sapiens
KCYGVSLN

SEQ ID NO: 223 - protein, 8 aa, Homo sapiens
IYKTPPIK

SEQ ID NO: 224 - protein, 8 aa, Homo sapiens
CVADYSFL

SEQ ID NO: 225 - protein, 8 aa, Homo sapiens
SVYAWDRR

SEQ ID NO: 226 - protein, 8 aa, Homo sapiens
RFFRKSNL

SEQ ID NO: 227 - protein, 8 aa, Homo sapiens
DISTEIYQ

SEQ ID NO: 228 - protein, 8 aa, Homo sapiens
YQPHRVVV

SEQ ID NO: 229 - protein, 8 aa, Homo sapiens
FVIRGDQV

SEQ ID NO: 230 - protein, 8 aa, Homo sapiens
NATKFSSV

SEQ ID NO: 231 - protein, 8 aa, Homo sapiens
NLCPFSEI

SEQ ID NO: 232 - protein, 8 aa, Homo sapiens
ASATVCGP

SEQ ID NO: 233 - protein, 8 aa, Homo sapiens
KINNCVAD

SEQ ID NO: 234 - protein, 8 aa, Homo sapiens
KSYGFQPT

SEQ ID NO: 235 - protein, 15 aa, Homo sapiens
LCPFSEIFNATKFSS

SEQ ID NO: 236 - protein, 15 aa, Homo sapiens
NCYLPLKSYGFQPTY

SEQ ID NO: 237 - protein, 15 aa, Homo sapiens
GNHKYRFRFFRKSNL

SEQ ID NO: 238 - protein, 15 aa, Homo sapiens
PFERDISTEIYQVGN

SEQ ID NO: 239 - protein, 15 aa, Homo sapiens
KKLDSKVVGNHKYRF

SEQ ID NO: 240 - protein, 15 aa, Homo sapiens
KGLNCYLPLKSYGFQ

SEQ ID NO: 241 - protein, 15 aa, Homo sapiens
LVLLPLVSSQCVNFT

SEQ ID NO: 242 - protein, 15 aa, Homo sapiens
RGDQVKQIAPGQTGN

SEQ ID NO: 243 - protein, 15 aa, Homo sapiens
SASFSTFKCYGVSLN

SEQ ID NO: 244 - protein, 15 aa, Homo sapiens
KLDSKVVGNHKYRFR

SEQ ID NO: 245 - protein, 15 aa, Homo sapiens
FAQVKQIYKTPPIKY

SEQ ID NO: 246 - protein, 15 aa, Homo sapiens
ADYSFLYNSASFSTF

SEQ ID NO: 247 - protein, 15 aa, Homo sapiens
ATKFSSVYAWDRRKI

SEQ ID NO: 248 - protein, 15 aa, Homo sapiens
PHRVVVLSFELLHAS

SEQ ID NO: 249 - protein, 15 aa, Homo sapiens
FERDISTEIYQVGNK

SEQ ID NO: 250 - protein, 15 aa, Homo sapiens
AKGLNCYLPLKSYGF

SEQ ID NO: 251 - protein, 15 aa, Homo sapiens
SIVRFPNITNLCPFS

SEQ ID NO: 252 - protein, 15 aa, Homo sapiens
NNCVADYSFLYNSAS

SEQ ID NO: 253 - protein, 15 aa, Homo sapiens
KGAKGLNCYLPLKSY

SEQ ID NO: 254 - protein, 14 aa, Homo sapiens
LCPFSEIFNATKFS

SEQ ID NO: 255 - protein, 14 aa, Homo sapiens
NCYLPLKSYGFQPT

SEQ ID NO: 256 - protein, 14 aa, Homo sapiens
GNHKYRFRFFRKSN

SEQ ID NO: 257 - protein, 14 aa, Homo sapiens
PFERDISTEIYQVG

SEQ ID NO: 258 - protein, 14 aa, Homo sapiens
KKLDSKVVGNHKYR

SEQ ID NO: 259 - protein, 14 aa, Homo sapiens
KGLNCYLPLKSYGF

SEQ ID NO: 260 - protein, 14 aa, Homo sapiens
LVLLPLVSSQCVNF

SEQ ID NO: 261 - protein, 14 aa, Homo sapiens
RGDQVKQIAPGQTG

SEQ ID NO: 262 - protein, 14 aa, Homo sapiens
SASFSTFKCYGVSL

SEQ ID NO: 263 - protein, 14 aa, Homo sapiens
KLDSKVVGNHKYRF

SEQ ID NO: 264 - protein, 14 aa, Homo sapiens
FAQVKQIYKTPPIK

SEQ ID NO: 265 - protein, 14 aa, Homo sapiens
ADYSFLYNSASFST

SEQ ID NO: 266 - protein, 14 aa, Homo sapiens
ATKFSSVYAWDRRK

SEQ ID NO: 267 - protein, 14 aa, Homo sapiens
PHRVVVLSFELLHA

SEQ ID NO: 268 - protein, 14 aa, Homo sapiens
FERDISTEIYQVGN

SEQ ID NO: 269 - protein, 14 aa, Homo sapiens
AKGLNCYLPLKSYG

SEQ ID NO: 270 - protein, 14 aa, Homo sapiens
SIVRFPNITNLCPF

SEQ ID NO: 271 - protein, 14 aa, Homo sapiens
NNCVADYSFLYNSA

SEQ ID NO: 272 - protein, 14 aa, Homo sapiens
KGAKGLNCYLPLKS

SEQ ID NO: 273 - protein, 24 aa, Homo sapiens
CVNFTTRTQLPPAYTNSFTRGVYY

SEQ ID NO: 274 - protein, 26 aa, Homo sapiens
NITNLCPFSEIFNATKFSSVYAWDRR

SEQ ID NO: 275 - protein, 33 aa, Homo sapiens
INNCVADYSFLYNSASFSTFKCYGVSLNKLNDL

SEQ ID NO: 276 - protein, 18 aa, Homo sapiens
RGDQVKQIAPGQTGNIAD

SEQ ID NO: 277 - protein, 47 aa, Homo sapiens
KKLDSKWGNHKYRFRFFRKSNLKPFERDISTEISTEIYQVGNKPCKG

SEQ ID NO: 278 - protein, 6 aa, Homo sapiens
TYGVGY

SEQ ID NO: 279 - protein, 16 aa, Homo sapiens
LHASATVCGPKKSTNL

SEQ ID NO: 280 - protein, 30 aa, Homo sapiens
VKQIYKTPPIKYFGGFNFSQILPDPSKPSK

SEQ ID NO: 281 - protein, 22 aa, Homo sapiens
CVNFTTRTQLPPAYTNSFTRGV

SEQ ID NO: 282 - protein, 24 aa, Homo sapiens
NITNLCPFSEIFNATKFSSVYAWD

SEQ ID NO: 283 - protein, 31 aa, Homo sapiens
INNCVADYSFLYNSASFSTFKCYGVSLNKLN

SEQ ID NO: 284 - protein, 16 aa, Homo sapiens
RGDQVKQIAPGQTGNI

SEQ ID NO: 285 - protein, 45 aa, Homo sapiens
KKLDSKWGNHKYRFRFFRKSNLKPFERDISTEISTEIYQVGNKPC

SEQ ID NO: 286 - protein, 14 aa, Homo sapiens
LHASATVCGPKKST

SEQ ID NO: 287 - protein, 28 aa, Homo sapiens
VKQIYKTPPIKYFGGFNFSQILPDPSKP

SEQ ID NO: 288 - protein, 22 aa, Homo sapiens
NFTTRTQLPPAYTNSFTRGVYY

SEQ ID NO: 289 - protein, 24 aa, Homo sapiens
TNLCPFSEIFNATKFSSVYAWDRR

SEQ ID NO: 290 - protein, 31 aa, Homo sapiens
NCVADYSFLYNSASFSTFKCYGVSLNKLNDL

SEQ ID NO: 291 - protein, 16 aa, Homo sapiens
DQVKQIAPGQTGNIAD

SEQ ID NO: 292 - protein, 45 aa, Homo sapiens
LDSKWGNHKYRFRFFRKSNLKPFERDISTEISTEIYQVGNKPCKG

SEQ ID NO: 293 - protein, 14 aa, Homo sapiens
ASATVCGPKKSTNL

SEQ ID NO: 294 - protein, 28 aa, Homo sapiens
QIYKTPPIKYFGGFNFSQILPDPSKPSK

SEQ ID NO: 295 - DNA, 7354 bp, synthetic construct
  source 1..7354: mol_type = other DNA; note = Sythesized Vaccine Candidate 10
tagttattaatagtaatcaattacggggtcattagttcatagcccatatatggagttccgcgttacataacttacggtaaatggcccgcctggctgaccgcccaacgacccccgcccattgacgtcaataatgacgtatgttcccatagtaacgccaatagggactttccattgacgtcaatgggtggagtatttacggtaaactgcccacttggcagtacatcaagtgtatcatatgccaagtacgccccctattgacgtcaatgacggtaaatggcccgcctggcattatgcccagtacatgaccttatgggactttcctacttggcagtacatctacgtattagtcatcgctattaccatggtgatgcggttttggcagtacatcaatgggcgtggatagcggtttgactcacggggatttccaagtctccaccccattgacgtcaatgggagtttgttttggcaccaaaatcaacgggactttccaaaatgtcgtaacaactccgccccattgacgcaaatgggcggtaggcgtgtacggtgggaggtctatataagcagagctggtttagtgaaccgtcagatcgagaataaactagtattcttctggtccccacagactcagagagaacccgccaccatgttcgtgttcctggtgctgctgcccctggtgagcagccagtgcgtgaacctgaccaccaggacccagctgccccccgcctacaccaacagcttcaccaggggcgtgtactaccccgacaaggtgttcaggagcagcgtgctgcacagcacccaggacctgttcctgcccttcttcagcaacgtgacctggttccacgccatccacgtgagcggcaccaacggcaccaagaggttcgacaaccccgtgctgcccttcaacgacggcgtgtacttcgccagcaccgagaagagcaacatcatcaggggctggatcttcggcaccaccctggacagcaagacccagagcctgctgatcgtgaacaacgccaccaacgtggtgatcaaggtgtgcgagttccagttctgcaacgaccccttcctgggcgtgtactaccacaagaacaacaagagctggatggagagcgagttcagggtgtacagcagcgccaacaactgcaccttcgagtacgtgagccagcccttcctgatggacctggagggcaagcagggcaacttcaagaacctgagggagttcgtgttcaagaacatcgacggctacttcaagatctacagcaagcacacccccatcaacctggtgagggacctgccccagggcttcagcgccctggagcccctggtggacctgcccatcggcatcaacatcaccaggttccagaccctgctggccctgcacaggagctacctgacccccggcgacagcagcagcggctggaccgccggcgccgccgcctactacgtgggctacctgcagcccaggaccttcctgctgaagtacaacgagaacggcaccatcaccgacgccgtggactgcgccctggaccccctgagcgagaccaagtgcaccctgaagagcttcaccgtggagaagggcatctaccagaccagcaacttcagggtgcagcccaccgagagcatcgtgaggttccccaacatcaccaacctgtgccccttcggcgaggtgttcaacgccaccaggttcgccagcgtgtacgcctggaacaggaagaggatcagcaactgcgtggccgactacagcgtgctgtacaacagcgccagcttcagcaccttcaagtgctacggcgtgagccccaccaagctgaacgacctgtgcttcaccaacgtgtacgccgacagcttcgtgatcaggggcgacgaggtgaggcagatcgcccccggccagaccggcaagatcgccgactacaactacaagctgcccgacgacttcaccggctgcgtgatcgcctggaacagcaacaacctggacagcaaggtgggcggcaactacaactacctgtacaggctgttcaggaagagcaacctgaagcccttcgagagggacatcagcaccgagatctaccaggccggcagcaccccctgcaacggcgtggagggcttcaactgctacttccccctgcagagctacggcttccagcccaccaacggcgtgggctaccagccctacagggtggtggtgctgagcttcgagctgctgcacgcccccgccaccgtgtgcggccccaagaagagcaccaacctggtgaagaacaagtgcgtgaacttcaacttcaacggcctgaccggcaccggcgtgctgaccgagagcaacaagaagttcctgcccttccagcagttcggcagggacatcgccgacaccaccgacgccgtgagggacccccagaccctggagatcctggacatcaccccctgcagcttcggcggcgtgagcgtgatcacccccggcaccaacaccagcaaccaggtggccgtgctgtaccaggacgtgaactgcaccgaggtgcccgtggccatccacgccgaccagctgacccccacctggagggtgtacagcaccggcagcaacgtgttccagaccagggccggctgcctgatcggcgccgagcacgtgaacaacagctacgagtgcgacatccccatcggcgccggcatctgcgccagctaccagacccagaccaacagccccaggagggccaggagcgtggccagccagagcatcatcgcctacaccatgagcctgggcgccgagaacagcgtggcctacagcaacaacagcatcgccatccccaccaacttcaccatcagcgtgaccaccgagatcctgcccgtgagcatgaccaagaccagcgtggactgcaccatgtacatctgcggcgacagcaccgagtgcagcaacctgctgctgcagtacggcagcttctgcacccagctgaacagggccctgaccggcatcgccgtggagcaggacaagaacacccaggaggtgttcgcccaggtgaagcagatctacaagaccccccccatcaaggacttcggcggcttcaacttcagccagatcctgcccgaccccagcaagcccagcaagaggagcttcatcgaggacctgctgttcaacaaggtgaccctggccgacgccggcttcatcaagcagtacggcgactgcctgggcgacatcgccgccagggacctgatctgcgcccagaagttcaacggcctgaccgtgctgccccccctgctgaccgacgagatgatcgcccagtacaccagcgccctgctggccggcaccatcaccagcggctggaccttcggcgccggcgccgccctgcagatccccttcgccatgcagatggcctacaggttcaacggcatcggcgtgacccagaacgtgctgtacgagaaccagaagctgatcgccaaccagttcaacagcgccatcggcaagatccaggacagcctgagcagcaccgccagcgccctgggcaagctgcaggacgtggtgaaccagaacgcccaggccctgaacaccctggtgaagcagctgagcagcaacttcggcgccatcagcagcgtgctgaacgacatcctgagcaggctggacccccccgaggccgaggtgcagatcgacaggctgatcaccggcaggctgcagagcctgcagacctacgtgacccagcagctgatcagggccgccgagatcagggccagcgccaacctggccgccaccaagatgagcgagtgcgtgctgggccagagcaagagggtggacttctgcggcaagggctaccacctgatgagcttcccccagagcgccccccacggcgtggtgttcctgcacgtgacctacgtgcccgcccaggagaagaacttcaccaccgcccccgccatctgccacgacggcaaggcccacttccccagggagggcgtgttcgtgagcaacggcacccactggttcgtgacccagaggaacttctacgagccccagatcatcaccaccgacaacaccttcgtgagcggcaactgcgacgtggtgatcggcatcgtgaacaacaccgtgtacgaccccctgcagcccgagctggacagcttcaaggaggagctggacaagtacttcaagaaccacaccagccccgacgtggacctgggcgacatcagcggcatcaacgccagcgtggtgaacatccagaaggagatcgacaggctgaacgaggtggccaagaacctgaacgagagcctgatcgacctgcaggagctgggcaagtacgagcagtacatcaagtggccctggtacatctggctgggcttcatcgccggcctgatcgccatcgtgatggtgaccatcatgctgtgctgcatgaccagctgctgcagctgcctgaagggctgctgcagctgcggcagctgctgcaagttcgacgaggacgacagcgagcccgtgctgaagggcgtgaagctgcactacaccggaagcggagccacgaacttctctctgttaaagcaagcaggagatgttgaagaaaaccccgggcctatggagagcctggtgcccggcttcaacgagaagacccacgtgcagctgagcctgcccgtgctgcaggtgagggacgtgctggtgaggggcttcggcgacagcgtggaggaggtgctgagcgaggccaggcagcacctgaaggacggcacctgcggcctggtggaggtggagaagggcgtgctgccccagctggagcagccctacgtgttcatcaagaggagcgacgccaggaccgccccccacggccacgtgatggtggagctggtggccgagctggagggcatccagtacggcaggagcggcgagaccctgggcgtgctggtgccccacgtgggcgagatccccgtggcctacaggaaggtgctgctgaggaagaacggcaacaagggcgccggcggccacagctacggcgccgacctgaagagcttcgacctgggcgacgagctgggcaccgacccctacgaggacttccaggagaactggaacaccaagcacagcagcggcgtgaccagggagctgatgagggagctgaacggcggcggaagcggagagggcaggggaagtcttctaacatgcggggacgtggaggaaaatcccggccccgcctacaccaggtacgtggacaacaacttctgcggccccgacggctaccccctggagtgcatcaaggacctgctggccagggccggcaaggccagctgcaccctgagcgagcagctggacttcatcgacaccaagaggggcgtgtactgctgcagggagcacgagcacgagatcgcctggtacaccgagaggagcgagaagagctacgagctgcagacccccttcgagatcaagctggccaagaagttcgacaccttcaacggcgagtgccccaacttcgtgttccccctgaacagcatcatcaagaccatccagcccagggtggagaagaagaagctggacggcttcatgggcaggatcaggagcgtgtaccccgtggccagccccaacgagtgcaaccagatgtgcctgagcaccctgatgaagtgcgaccactgcggcgagaccagctggcagaccggcgacttcgtgaaggccacctgcgagttctgcggcaccgagaacctgaccaaggagggcgccaccacctgcggctacctgccccagaacgccgtggtgaagatctactgccccgcctgccacaacagcgaggtgggccccgagcacagcctggccgagtaccacaacgagagcggcctgaagaccatcctgaggaagggcggcaggaccatcgccttcggcggctgcgtgttcagctacgtgggctgccacaacaagtgcgcctactgggtgcccagggccagcgccaacatcggctgcaaccacaccggcgtggtgggcgagggcagcgagggcctgaacgacaacctgctggagatcctgcagaaggagaaggtgaacatcaacatcgtgggcgacttcaagctgaacgaggagatcgccatcatcctggccagcttcagcgccagcaccagcgccttcgtggagaccgtgaagggcctggactacaaggccttcaagcagatcgtggagagctgcggcaacttcaaggtgaccaagggcaaggccaagaagggcgcctggaacatcggcgagcagaagagcatcctgagccccctgtacgccttcgccagcgaggccgccagggtggtgaggagcatcttcagcaggaccctggagaccgcccagaacagcgtgagggtgctgcagaaggccgccatcaccatcctggacggcatcagccagtacagcctgaggctgatcgacgccatgatgttcaccagcgacctggccaccaacaacctggtggtgatggcctacatcaccggcggcgtggtgcagctgaccagccagtggctgaccaacatcttcggcaccgtgtacgagaagctgaagcccgtgctggactggctggaggagaagttcaaggagggcgtggagttcctgagggacggctgggagatcgtgaagttcatcagcacctgcgcctgcgagatcgtgggcggccagatcgtgacctgcgccaaggagatcaaggagagcgtgcagaccttcttcaagctggtgaacaagttcctggccctgtgcgccgacagcatcatcatcggcggcgccaagctgaaggccctgaacctgggcgagaccttcgtgacccacagcaagggcctgtacaggaagtgcgtgaagagcagggaggagaccggcctgctgatgcccctgaaggcccccaaggagatcatcttcctggagggcgagaccctgcccaccgaggtgctgaccgaggaggtggtgctgaagaccggcgacctgcagcccctggagcagcccaccagcgaggccgtggaggcccccctggtgggcacccccgtgtgcatcaacggcctgatgctgctggagatcaaggacaccgagaagtactgcgccctggcccccaacatgatggtgaccaacaacaccttcaccctgaagggcggctgatgactcgagctggtactgcatgcacgcaatgctagctgcccctttcccgtcctgggtaccccgagtctcccccgacctcgggtcccaggtatgctcccacctccacctgccccactcaccacctctgctagttccagacacctcccaagcacgcagcaatgcagctcaaaacgcttagcctagccacacccccacgggaaacagcagtgattaacctttagcaataaacgaaagtttaactaagctatactaaccccagggttggtcaatttcgtgccagccacaccctggagctagcaaaaaaaa

SEQ ID NO: 296 - DNA, 7354 bp, synthetic construct
  source 1..7354: mol_type = other DNA; note = Synthesized Vaccine Candidate 11
tagttattaatagtaatcaattacggggtcattagttcatagcccatatatggagttccgcgttacataacttacggtaaatggcccgcctggctgaccgcccaacgacccccgcccattgacgtcaataatgacgtatgttcccatagtaacgccaatagggactttccattgacgtcaatgggtggagtatttacggtaaactgcccacttggcagtacatcaagtgtatcatatgccaagtacgccccctattgacgtcaatgacggtaaatggcccgcctggcattatgcccagtacatgaccttatgggactttcctacttggcagtacatctacgtattagtcatcgctattaccatggtgatgcggttttggcagtacatcaatgggcgtggatagcggtttgactcacggggatttccaagtctccaccccattgacgtcaatgggagtttgttttggcaccaaaatcaacgggactttccaaaatgtcgtaacaactccgccccattgacgcaaatgggcggtaggcgtgtacggtgggaggtctatataagcagagctggtttagtgaaccgtcagatcgagaataaactagtattcttctggtccccacagactcagagagaacccgccaccatgttcgtgttcctggtgctgctgcccctggtgagcagccagtgcgtgaacctgaccaccaggacccagctgccccccgcctacaccaacagcttcaccaggggcgtgtactaccccgacaaggtgttcaggagcagcgtgctgcacagcacccaggacctgttcctgcccttcttcagcaacgtgacctggttccacgccatccacgtgagcggcaccaacggcaccaagaggttcgacaaccccgtgctgcccttcaacgacggcgtgtacttcgccagcaccgagaagagcaacatcatcaggggctggatcttcggcaccaccctggacagcaagacccagagcctgctgatcgtgaacaacgccaccaacgtggtgatcaaggtgtgcgagttccagttctgcaacgaccccttcctgggcgtgtactaccacaagaacaacaagagctggatggagagcgagttcagggtgtacagcagcgccaacaactgcaccttcgagtacgtgagccagcccttcctgatggacctggagggcaagcagggcaacttcaagaacctgagggagttcgtgttcaagaacatcgacggctacttcaagatctacagcaagcacacccccatcaacctggtgagggacctgccccagggcttcagcgccctggagcccctggtggacctgcccatcggcatcaacatcaccaggttccagaccctgctggccctgcacaggagctacctgacccccggcgacagcagcagcggctggaccgccggcgccgccgcctactacgtgggctacctgcagcccaggaccttcctgctgaagtacaacgagaacggcaccatcaccgacgccgtggactgcgccctggaccccctgagcgagaccaagtgcaccctgaagagcttcaccgtggagaagggcatctaccagaccagcaacttcagggtgcagcccaccgagagcatcgtgaggttccccaacatcaccaacctgtgccccttcggcgaggtgttcaacgccaccaggttcgccagcgtgtacgcctggaacaggaagaggatcagcaactgcgtggccgactacagcgtgctgtacaacagcgccagcttcagcaccttcaagtgctacggcgtgagccccaccaagctgaacgacctgtgcttcaccaacgtgtacgccgacagcttcgtgatcaggggcgacgaggtgaggcagatcgcccccggccagaccggcaagatcgccgactacaactacaagctgcccgacgacttcaccggctgcgtgatcgcctggaacagcaacaacctggacagcaaggtgggcggcaactacaactacctgtacaggctgttcaggaagagcaacctgaagcccttcgagagggacatcagcaccgagatctaccaggccggcagcaccccctgcaacggcgtggagggcttcaactgctacttccccctgcagagctacggcttccagcccaccaacggcgtgggctaccagccctacagggtggtggtgctgagcttcgagctgctgcacgcccccgccaccgtgtgcggccccaagaagagcaccaacctggtgaagaacaagtgcgtgaacttcaacttcaacggcctgaccggcaccggcgtgctgaccgagagcaacaagaagttcctgcccttccagcagttcggcagggacatcgccgacaccaccgacgccgtgagggacccccagaccctggagatcctggacatcaccccctgcagcttcggcggcgtgagcgtgatcacccccggcaccaacaccagcaaccaggtggccgtgctgtaccaggacgtgaactgcaccgaggtgcccgtggccatccacgccgaccagctgacccccacctggagggtgtacagcaccggcagcaacgtgttccagaccagggccggctgcctgatcggcgccgagcacgtgaacaacagctacgagtgcgacatccccatcggcgccggcatctgcgccagctaccagacccagaccaacagccccggcagcgccagcagcgtggccagccagagcatcatcgcctacaccatgagcctgggcgccgagaacagcgtggcctacagcaacaacagcatcgccatccccaccaacttcaccatcagcgtgaccaccgagatcctgcccgtgagcatgaccaagaccagcgtggactgcaccatgtacatctgcggcgacagcaccgagtgcagcaacctgctgctgcagtacggcagcttctgcacccagctgaacagggccctgaccggcatcgccgtggagcaggacaagaacacccaggaggtgttcgcccaggtgaagcagatctacaagaccccccccatcaaggacttcggcggcttcaacttcagccagatcctgcccgaccccagcaagcccagcaagaggagccccatcgaggacctgctgttcaacaaggtgaccctggccgacgccggcttcatcaagcagtacggcgactgcctgggcgacatcgccgccagggacctgatctgcgcccagaagttcaacggcctgaccgtgctgccccccctgctgaccgacgagatgatcgcccagtacaccagcgccctgctggccggcaccatcaccagcggctggaccttcggcgccggccccgccctgcagatccccttccccatgcagatggcctacaggttcaacggcatcggcgtgacccagaacgtgctgtacgagaaccagaagctgatcgccaaccagttcaacagcgccatcggcaagatccaggacagcctgagcagcacccccagcgccctgggcaagctgcaggacgtggtgaaccagaacgcccaggccctgaacaccctggtgaagcagctgagcagcaacttcggcgccatcagcagcgtgctgaacgacatcctgagcaggctggacccccccgaggccgaggtgcagatcgacaggctgatcaccggcaggctgcagagcctgcagacctacgtgacccagcagctgatcagggccgccgagatcagggccagcgccaacctggccgccaccaagatgagcgagtgcgtgctgggccagagcaagagggtggacttctgcggcaagggctaccacctgatgagcttcccccagagcgccccccacggcgtggtgttcctgcacgtgacctacgtgcccgcccaggagaagaacttcaccaccgcccccgccatctgccacgacggcaaggcccacttccccagggagggcgtgttcgtgagcaacggcacccactggttcgtgacccagaggaacttctacgagccccagatcatcaccaccgacaacaccttcgtgagcggcaactgcgacgtggtgatcggcatcgtgaacaacaccgtgtacgaccccctgcagcccgagctggacagcttcaaggaggagctggacaagtacttcaagaaccacaccagccccgacgtggacctgggcgacatcagcggcatcaacgccagcgtggtgaacatccagaaggagatcgacaggctgaacgaggtggccaagaacctgaacgagagcctgatcgacctgcaggagctgggcaagtacgagcagtacatcaagtggccctggtacatctggctgggcttcatcgccggcctgatcgccatcgtgatggtgaccatcatgctgtgctgcatgaccagctgctgcagctgcctgaagggctgctgcagctgcggcagctgctgcaagttcgacgaggacgacagcgagcccgtgctgaagggcgtgaagctgcactacaccggaagcggagccacgaacttctctctgttaaagcaagcaggagatgttgaagaaaaccccgggcctatggagagcctggtgcccggcttcaacgagaagacccacgtgcagctgagcctgcccgtgctgcaggtgagggacgtgctggtgaggggcttcggcgacagcgtggaggaggtgctgagcgaggccaggcagcacctgaaggacggcacctgcggcctggtggaggtggagaagggcgtgctgccccagctggagcagccctacgtgttcatcaagaggagcgacgccaggaccgccccccacggccacgtgatggtggagctggtggccgagctggagggcatccagtacggcaggagcggcgagaccctgggcgtgctggtgccccacgtgggcgagatccccgtggcctacaggaaggtgctgctgaggaagaacggcaacaagggcgccggcggccacagctacggcgccgacctgaagagcttcgacctgggcgacgagctgggcaccgacccctacgaggacttccaggagaactggaacaccaagcacagcagcggcgtgaccagggagctgatgagggagctgaacggcggcggaagcggagagggcaggggaagtcttctaacatgcggggacgtggaggaaaatcccggccccgcctacaccaggtacgtggacaacaacttctgcggccccgacggctaccccctggagtgcatcaaggacctgctggccagggccggcaaggccagctgcaccctgagcgagcagctggacttcatcgacaccaagaggggcgtgtactgctgcagggagcacgagcacgagatcgcctggtacaccgagaggagcgagaagagctacgagctgcagacccccttcgagatcaagctggccaagaagttcgacaccttcaacggcgagtgccccaacttcgtgttccccctgaacagcatcatcaagaccatccagcccagggtggagaagaagaagctggacggcttcatgggcaggatcaggagcgtgtaccccgtggccagccccaacgagtgcaaccagatgtgcctgagcaccctgatgaagtgcgaccactgcggcgagaccagctggcagaccggcgacttcgtgaaggccacctgcgagttctgcggcaccgagaacctgaccaaggagggcgccaccacctgcggctacctgccccagaacgccgtggtgaagatctactgccccgcctgccacaacagcgaggtgggccccgagcacagcctggccgagtaccacaacgagagcggcctgaagaccatcctgaggaagggcggcaggaccatcgccttcggcggctgcgtgttcagctacgtgggctgccacaacaagtgcgcctactgggtgcccagggccagcgccaacatcggctgcaaccacaccggcgtggtgggcgagggcagcgagggcctgaacgacaacctgctggagatcctgcagaaggagaaggtgaacatcaacatcgtgggcgacttcaagctgaacgaggagatcgccatcatcctggccagcttcagcgccagcaccagcgccttcgtggagaccgtgaagggcctggactacaaggccttcaagcagatcgtggagagctgcggcaacttcaaggtgaccaagggcaaggccaagaagggcgcctggaacatcggcgagcagaagagcatcctgagccccctgtacgccttcgccagcgaggccgccagggtggtgaggagcatcttcagcaggaccctggagaccgcccagaacagcgtgagggtgctgcagaaggccgccatcaccatcctggacggcatcagccagtacagcctgaggctgatcgacgccatgatgttcaccagcgacctggccaccaacaacctggtggtgatggcctacatcaccggcggcgtggtgcagctgaccagccagtggctgaccaacatcttcggcaccgtgtacgagaagctgaagcccgtgctggactggctggaggagaagttcaaggagggcgtggagttcctgagggacggctgggagatcgtgaagttcatcagcacctgcgcctgcgagatcgtgggcggccagatcgtgacctgcgccaaggagatcaaggagagcgtgcagaccttcttcaagctggtgaacaagttcctggccctgtgcgccgacagcatcatcatcggcggcgccaagctgaaggccctgaacctgggcgagaccttcgtgacccacagcaagggcctgtacaggaagtgcgtgaagagcagggaggagaccggcctgctgatgcccctgaaggcccccaaggagatcatcttcctggagggcgagaccctgcccaccgaggtgctgaccgaggaggtggtgctgaagaccggcgacctgcagcccctggagcagcccaccagcgaggccgtggaggcccccctggtgggcacccccgtgtgcatcaacggcctgatgctgctggagatcaaggacaccgagaagtactgcgccctggcccccaacatgatggtgaccaacaacaccttcaccctgaagggcggctgatgactcgagctggtactgcatgcacgcaatgctagctgcccctttcccgtcctgggtaccccgagtctcccccgacctcgggtcccaggtatgctcccacctccacctgccccactcaccacctctgctagttccagacacctcccaagcacgcagcaatgcagctcaaaacgcttagcctagccacacccccacgggaaacagcagtgattaacctttagcaataaacgaaagtttaactaagctatactaaccccagggttggtcaatttcgtgccagccacaccctggagctagcaaaaaaaa

SEQ ID NO: 297 - DNA, 6682 bp, synthetic construct
  source 1..6682: mol_type = other DNA; note = Synthesized Vaccine Candidate 12
tagttattaatagtaatcaattacggggtcattagttcatagcccatatatggagttccgcgttacataacttacggtaaatggcccgcctggctgaccgcccaacgacccccgcccattgacgtcaataatgacgtatgttcccatagtaacgccaatagggactttccattgacgtcaatgggtggagtatttacggtaaactgcccacttggcagtacatcaagtgtatcatatgccaagtacgccccctattgacgtcaatgacggtaaatggcccgcctggcattatgcccagtacatgaccttatgggactttcctacttggcagtacatctacgtattagtcatcgctattaccatggtgatgcggttttggcagtacatcaatgggcgtggatagcggtttgactcacggggatttccaagtctccaccccattgacgtcaatgggagtttgttttggcaccaaaatcaacgggactttccaaaatgtcgtaacaactccgccccattgacgcaaatgggcggtaggcgtgtacggtgggaggtctatataagcagagctggtttagtgaaccgtcagatcgagaataaactagtattcttctggtccccacagactcagagagaacccgccaccatgttcgtgttcctggtgctgctgcccctggtgagcagccagtgcgtgaacctgaccaccaggacccagctgccccccgcctacaccaacagcttcaccaggggcgtgtactaccccgacaaggtgttcaggagcagcgtgctgcacagcacccaggacctgttcctgcccttcttcagcaacgtgacctggttccacgccatccacgtgagcggcaccaacggcaccaagaggttcgacaaccccgtgctgcccttcaacgacggcgtgtacttcgccagcaccgagaagagcaacatcatcaggggctggatcttcggcaccaccctggacagcaagacccagagcctgctgatcgtgaacaacgccaccaacgtggtgatcaaggtgtgcgagttccagttctgcaacgaccccttcctgggcgtgtactaccacaagaacaacaagagctggatggagagcgagttcagggtgtacagcagcgccaacaactgcaccttcgagtacgtgagccagcccttcctgatggacctggagggcaagcagggcaacttcaagaacctgagggagttcgtgttcaagaacatcgacggctacttcaagatctacagcaagcacacccccatcaacctggtgagggacctgccccagggcttcagcgccctggagcccctggtggacctgcccatcggcatcaacatcaccaggttccagaccctgctggccctgcacaggagctacctgacccccggcgacagcagcagcggctggaccgccggcgccgccgcctactacgtgggctacctgcagcccaggaccttcctgctgaagtacaacgagaacggcaccatcaccgacgccgtggactgcgccctggaccccctgagcgagaccaagtgcaccctgaagagcttcaccgtggagaagggcatctaccagaccagcaacttcagggtgcagcccaccgagagcatcgtgaggttccccaacatcaccaacctgtgccccttcggcgaggtgttcaacgccaccaggttcgccagcgtgtacgcctggaacaggaagaggatcagcaactgcgtggccgactacagcgtgctgtacaacagcgccagcttcagcaccttcaagtgctacggcgtgagccccaccaagctgaacgacctgtgcttcaccaacgtgtacgccgacagcttcgtgatcaggggcgacgaggtgaggcagatcgcccccggccagaccggcaagatcgccgactacaactacaagctgcccgacgacttcaccggctgcgtgatcgcctggaacagcaacaacctggacagcaaggtgggcggcaactacaactacctgtacaggctgttcaggaagagcaacctgaagcccttcgagagggacatcagcaccgagatctaccaggccggcagcaccccctgcaacggcgtggagggcttcaactgctacttccccctgcagagctacggcttccagcccaccaacggcgtgggctaccagccctacagggtggtggtgctgagcttcgagctgctgcacgcccccgccaccgtgtgcggccccaagaagagcaccaacctggtgaagaacaagtgcgtgaacttcaacttcaacggcctgaccggcaccggcgtgctgaccgagagcaacaagaagttcctgcccttccagcagttcggcagggacatcgccgacaccaccgacgccgtgagggacccccagaccctggagatcctggacatcaccccctgcagcttcggcggcgtgagcgtgatcacccccggcaccaacaccagcaaccaggtggccgtgctgtaccaggacgtgaactgcaccgaggtgcccgtggccatccacgccgaccagctgacccccacctggagggtgtacagcaccggcagcaacgtgttccagaccagggccggctgcctgatcggcgccgagcacgtgaacaacagctacgagtgcgacatccccatcggcgccggcatctgcgccagctaccagacccagaccaacagccccaggagggccaggagcgtggccagccagagcatcatcgcctacaccatgagcctgggcgccgagaacagcgtggcctacagcaacaacagcatcgccatccccaccaacttcaccatcagcgtgaccaccgagatcctgcccgtgagcatgaccaagaccagcgtggactgcaccatgtacatctgcggcgacagcaccgagtgcagcaacctgctgctgcagtacggcagcttctgcacccagctgaacagggccctgaccggcatcgccgtggagcaggacaagaacacccaggaggtgttcgcccaggtgaagcagatctacaagaccccccccatcaaggacttcggcggcttcaacttcagccagatcctgcccgaccccagcaagcccagcaagaggagcttcatcgaggacctgctgttcaacaaggtgaccctggccgacgccggcttcatcaagcagtacggcgactgcctgggcgacatcgccgccagggacctgatctgcgcccagaagttcaacggcctgaccgtgctgccccccctgctgaccgacgagatgatcgcccagtacaccagcgccctgctggccggcaccatcaccagcggctggaccttcggcgccggcgccgccctgcagatccccttcgccatgcagatggcctacaggttcaacggcatcggcgtgacccagaacgtgctgtacgagaaccagaagctgatcgccaaccagttcaacagcgccatcggcaagatccaggacagcctgagcagcaccgccagcgccctgggcaagctgcaggacgtggtgaaccagaacgcccaggccctgaacaccctggtgaagcagctgagcagcaacttcggcgccatcagcagcgtgctgaacgacatcctgagcaggctggacccccccgaggccgaggtgcagatcgacaggctgatcaccggcaggctgcagagcctgcagacctacgtgacccagcagctgatcagggccgccgagatcagggccagcgccaacctggccgccaccaagatgagcgagtgcgtgctgggccagagcaagagggtggacttctgcggcaagggctaccacctgatgagcttcccccagagcgccccccacggcgtggtgttcctgcacgtgacctacgtgcccgcccaggagaagaacttcaccaccgcccccgccatctgccacgacggcaaggcccacttccccagggagggcgtgttcgtgagcaacggcacccactggttcgtgacccagaggaacttctacgagccccagatcatcaccaccgacaacaccttcgtgagcggcaactgcgacgtggtgatcggcatcgtgaacaacaccgtgtacgaccccctgcagcccgagctggacagcttcaaggaggagctggacaagtacttcaagaaccacaccagccccgacgtggacctgggcgacatcagcggcatcaacgccagcgtggtgaacatccagaaggagatcgacaggctgaacgaggtggccaagaacctgaacgagagcctgatcgacctgcaggagctgggcaagtacgagcagtacatcaagtggccctggtacatctggctgggcttcatcgccggcctgatcgccatcgtgatggtgaccatcatgctgtgctgcatgaccagctgctgcagctgcctgaagggctgctgcagctgcggcagctgctgcaagttcgacgaggacgacagcgagcccgtgctgaagggcgtgaagctgcactacaccggaagcggagccacgaacttctctctgttaaagcaagcaggagatgttgaagaaaaccccgggcctagcgccgtgaagaggaccatcaagggcacccaccactggctgctgctgaccatcctgaccagcctgctggtgctggtgcagagcacccagtggagcctgttcttcttcctgtacgagaacgccttcctgcccttcgccatgggcatcatcgccatgagcgccttcgccatgatgttcgtgaagcacaagcacgccttcctgtgcctgttcctgctgcccagcctggccaccgtggcctacttcaacatggtgtacatgcccgccagctgggtgatgaggatcatgacctggctggacatggtggacaccagcctgagcggcttcaagctgaaggactgcgtgatgtacgccagcgccgtggtgctgctgatcctgatgaccgccaggaccgtgtacgacgacggcgccaggagggtgtggaccctgatgaacgtgctgaccctggtgtacaaggtgtactacggcaacgccctggaccaggccatcagcatgtgggccctgatcatcagcgtgaccagcaactacagcggcgtggtgaccaccgtgatgttcctggccaggggcatcgtgttcatgtgcgtggagtactgccccatcttcttcatcaccggcaacaccctgcagtgcatcatgctggtgtactgcttcctgggctacttctgcacctgctacttcggcctgttctgcctgctgaacaggtacttcaggctgaccctgggcgtgtacgactacctggtgagcacccaggagttcaggtacatgaacagccagggcctgctgccccccaagaacagcatcgacgccttcaagctgaacatcaagctgctgggcgtgggcggcaagccctgcatcaaggtggccaccgtgcagggaagcggagagggcaggggaagtcttctaacatgcggggacgtggaggaaaatcccggccccagcaagatgagcgacgtgaagtgcaccagcgtggtgctgctgagcgtgctgcagcagctgagggtggagagcagcagcaagctgtgggcccagtgcgtgcagctgcacaacgacatcctgctggccaaggacaccaccgaggccttcgagaagatggtgagcctgctgagcgtgctgctgagcatgcagggcgccgtggacatcaacaagctgtgcgaggagatgctggacaacagggccaccctgcagggaagcggacagtgtactaattatgctctcttgaaattggctggagatgttgagagcaacccaggtcccgccatcgccagcgagttcagcagcctgcccagctacgccgccttcgccaccgcccaggaggcctacgagcaggccgtggccaacggcgacagcgaggtggtgctgaagaagctgaagaagagcctgaacgtggccaagagcgagttcgacagggacgccgccatgcagaggaagctggagaagatggccgaccaggccatgacccagatgtacaagcaggccaggagcgaggacaagagggccaaggtgaccagcgccatgcagaccatgctgttcaccatgctgaggaagctggacaacgacgccctgaacaacatcatcaacaacgccagggacggctgcgtgcccctgaacatcatccccctgaccaccgccgccaagctgatggtggtgatccccgactacaacacctacaagaacacctgcgacggcaccaccttcacctacgccagcgccctgtgggagatccagcaggtggtggacgccgacagcaagatcgtgcagctgagcgagatcagcatggacaacagccccaacctggcctggcccctgatcgtgaccgccctgagggccaacagcgccgtgaagctgcagtgatgactcgagctggtactgcatgcacgcaatgctagctgcccctttcccgtcctgggtaccccgagtctcccccgacctcgggtcccaggtatgctcccacctccacctgccccactcaccacctctgctagttccagacacctcccaagcacgcagcaatgcagctcaaaacgcttagcctagccacacccccacgggaaacagcagtgattaacctttagcaataaacgaaagtttaactaagctatactaaccccagggttggtcaatttcgtgccagccacaccctggagctagcaaaaaaaa

SEQ ID NO: 298 - DNA, 6682 bp, synthetic construct
  source 1..6682: mol_type = other DNA; note = Sythesized Vaccine Candidate 13
tagttattaatagtaatcaattacggggtcattagttcatagcccatatatggagttccgcgttacataacttacggtaaatggcccgcctggctgaccgcccaacgacccccgcccattgacgtcaataatgacgtatgttcccatagtaacgccaatagggactttccattgacgtcaatgggtggagtatttacggtaaactgcccacttggcagtacatcaagtgtatcatatgccaagtacgccccctattgacgtcaatgacggtaaatggcccgcctggcattatgcccagtacatgaccttatgggactttcctacttggcagtacatctacgtattagtcatcgctattaccatggtgatgcggttttggcagtacatcaatgggcgtggatagcggtttgactcacggggatttccaagtctccaccccattgacgtcaatgggagtttgttttggcaccaaaatcaacgggactttccaaaatgtcgtaacaactccgccccattgacgcaaatgggcggtaggcgtgtacggtgggaggtctatataagcagagctggtttagtgaaccgtcagatcgagaataaactagtattcttctggtccccacagactcagagagaacccgccaccatgttcgtgttcctggtgctgctgcccctggtgagcagccagtgcgtgaacctgaccaccaggacccagctgccccccgcctacaccaacagcttcaccaggggcgtgtactaccccgacaaggtgttcaggagcagcgtgctgcacagcacccaggacctgttcctgcccttcttcagcaacgtgacctggttccacgccatccacgtgagcggcaccaacggcaccaagaggttcgacaaccccgtgctgcccttcaacgacggcgtgtacttcgccagcaccgagaagagcaacatcatcaggggctggatcttcggcaccaccctggacagcaagacccagagcctgctgatcgtgaacaacgccaccaacgtggtgatcaaggtgtgcgagttccagttctgcaacgaccccttcctgggcgtgtactaccacaagaacaacaagagctggatggagagcgagttcagggtgtacagcagcgccaacaactgcaccttcgagtacgtgagccagcccttcctgatggacctggagggcaagcagggcaacttcaagaacctgagggagttcgtgttcaagaacatcgacggctacttcaagatctacagcaagcacacccccatcaacctggtgagggacctgccccagggcttcagcgccctggagcccctggtggacctgcccatcggcatcaacatcaccaggttccagaccctgctggccctgcacaggagctacctgacccccggcgacagcagcagcggctggaccgccggcgccgccgcctactacgtgggctacctgcagcccaggaccttcctgctgaagtacaacgagaacggcaccatcaccgacgccgtggactgcgccctggaccccctgagcgagaccaagtgcaccctgaagagcttcaccgtggagaagggcatctaccagaccagcaacttcagggtgcagcccaccgagagcatcgtgaggttccccaacatcaccaacctgtgccccttcggcgaggtgttcaacgccaccaggttcgccagcgtgtacgcctggaacaggaagaggatcagcaactgcgtggccgactacagcgtgctgtacaacagcgccagcttcagcaccttcaagtgctacggcgtgagccccaccaagctgaacgacctgtgcttcaccaacgtgtacgccgacagcttcgtgatcaggggcgacgaggtgaggcagatcgcccccggccagaccggcaagatcgccgactacaactacaagctgcccgacgacttcaccggctgcgtgatcgcctggaacagcaacaacctggacagcaaggtgggcggcaactacaactacctgtacaggctgttcaggaagagcaacctgaagcccttcgagagggacatcagcaccgagatctaccaggccggcagcaccccctgcaacggcgtggagggcttcaactgctacttccccctgcagagctacggcttccagcccaccaacggcgtgggctaccagccctacagggtggtggtgctgagcttcgagctgctgcacgcccccgccaccgtgtgcggccccaagaagagcaccaacctggtgaagaacaagtgcgtgaacttcaacttcaacggcctgaccggcaccggcgtgctgaccgagagcaacaagaagttcctgcccttccagcagttcggcagggacatcgccgacaccaccgacgccgtgagggacccccagaccctggagatcctggacatcaccccctgcagcttcggcggcgtgagcgtgatcacccccggcaccaacaccagcaaccaggtggccgtgctgtaccaggacgtgaactgcaccgaggtgcccgtggccatccacgccgaccagctgacccccacctggagggtgtacagcaccggcagcaacgtgttccagaccagggccggctgcctgatcggcgccgagcacgtgaacaacagctacgagtgcgacatccccatcggcgccggcatctgcgccagctaccagacccagaccaacagccccggcagcgccagcagcgtggccagccagagcatcatcgcctacaccatgagcctgggcgccgagaacagcgtggcctacagcaacaacagcatcgccatccccaccaacttcaccatcagcgtgaccaccgagatcctgcccgtgagcatgaccaagaccagcgtggactgcaccatgtacatctgcggcgacagcaccgagtgcagcaacctgctgctgcagtacggcagcttctgcacccagctgaacagggccctgaccggcatcgccgtggagcaggacaagaacacccaggaggtgttcgcccaggtgaagcagatctacaagaccccccccatcaaggacttcggcggcttcaacttcagccagatcctgcccgaccccagcaagcccagcaagaggagccccatcgaggacctgctgttcaacaaggtgaccctggccgacgccggcttcatcaagcagtacggcgactgcctgggcgacatcgccgccagggacctgatctgcgcccagaagttcaacggcctgaccgtgctgccccccctgctgaccgacgagatgatcgcccagtacaccagcgccctgctggccggcaccatcaccagcggctggaccttcggcgccggccccgccctgcagatccccttccccatgcagatggcctacaggttcaacggcatcggcgtgacccagaacgtgctgtacgagaaccagaagctgatcgccaaccagttcaacagcgccatcggcaagatccaggacagcctgagcagcacccccagcgccctgggcaagctgcaggacgtggtgaaccagaacgcccaggccctgaacaccctggtgaagcagctgagcagcaacttcggcgccatcagcagcgtgctgaacgacatcctgagcaggctggacccccccgaggccgaggtgcagatcgacaggctgatcaccggcaggctgcagagcctgcagacctacgtgacccagcagctgatcagggccgccgagatcagggccagcgccaacctggccgccaccaagatgagcgagtgcgtgctgggccagagcaagagggtggacttctgcggcaagggctaccacctgatgagcttcccccagagcgccccccacggcgtggtgttcctgcacgtgacctacgtgcccgcccaggagaagaacttcaccaccgcccccgccatctgccacgacggcaaggcccacttccccagggagggcgtgttcgtgagcaacggcacccactggttcgtgacccagaggaacttctacgagccccagatcatcaccaccgacaacaccttcgtgagcggcaactgcgacgtggtgatcggcatcgtgaacaacaccgtgtacgaccccctgcagcccgagctggacagcttcaaggaggagctggacaagtacttcaagaaccacaccagccccgacgtggacctgggcgacatcagcggcatcaacgccagcgtggtgaacatccagaaggagatcgacaggctgaacgaggtggccaagaacctgaacgagagcctgatcgacctgcaggagctgggcaagtacgagcagtacatcaagtggccctggtacatctggctgggcttcatcgccggcctgatcgccatcgtgatggtgaccatcatgctgtgctgcatgaccagctgctgcagctgcctgaagggctgctgcagctgcggcagctgctgcaagttcgacgaggacgacagcgagcccgtgctgaagggcgtgaagctgcactacaccggaagcggagccacgaacttctctctgttaaagcaagcaggagatgttgaagaaaaccccgggcctagcgccgtgaagaggaccatcaagggcacccaccactggctgctgctgaccatcctgaccagcctgctggtgctggtgcagagcacccagtggagcctgttcttcttcctgtacgagaacgccttcctgcccttcgccatgggcatcatcgccatgagcgccttcgccatgatgttcgtgaagcacaagcacgccttcctgtgcctgttcctgctgcccagcctggccaccgtggcctacttcaacatggtgtacatgcccgccagctgggtgatgaggatcatgacctggctggacatggtggacaccagcctgagcggcttcaagctgaaggactgcgtgatgtacgccagcgccgtggtgctgctgatcctgatgaccgccaggaccgtgtacgacgacggcgccaggagggtgtggaccctgatgaacgtgctgaccctggtgtacaaggtgtactacggcaacgccctggaccaggccatcagcatgtgggccctgatcatcagcgtgaccagcaactacagcggcgtggtgaccaccgtgatgttcctggccaggggcatcgtgttcatgtgcgtggagtactgccccatcttcttcatcaccggcaacaccctgcagtgcatcatgctggtgtactgcttcctgggctacttctgcacctgctacttcggcctgttctgcctgctgaacaggtacttcaggctgaccctgggcgtgtacgactacctggtgagcacccaggagttcaggtacatgaacagccagggcctgctgccccccaagaacagcatcgacgccttcaagctgaacatcaagctgctgggcgtgggcggcaagccctgcatcaaggtggccaccgtgcagggaagcggagagggcaggggaagtcttctaacatgcggggacgtggaggaaaatcccggccccagcaagatgagcgacgtgaagtgcaccagcgtggtgctgctgagcgtgctgcagcagctgagggtggagagcagcagcaagctgtgggcccagtgcgtgcagctgcacaacgacatcctgctggccaaggacaccaccgaggccttcgagaagatggtgagcctgctgagcgtgctgctgagcatgcagggcgccgtggacatcaacaagctgtgcgaggagatgctggacaacagggccaccctgcagggaagcggacagtgtactaattatgctctcttgaaattggctggagatgttgagagcaacccaggtcccgccatcgccagcgagttcagcagcctgcccagctacgccgccttcgccaccgcccaggaggcctacgagcaggccgtggccaacggcgacagcgaggtggtgctgaagaagctgaagaagagcctgaacgtggccaagagcgagttcgacagggacgccgccatgcagaggaagctggagaagatggccgaccaggccatgacccagatgtacaagcaggccaggagcgaggacaagagggccaaggtgaccagcgccatgcagaccatgctgttcaccatgctgaggaagctggacaacgacgccctgaacaacatcatcaacaacgccagggacggctgcgtgcccctgaacatcatccccctgaccaccgccgccaagctgatggtggtgatccccgactacaacacctacaagaacacctgcgacggcaccaccttcacctacgccagcgccctgtgggagatccagcaggtggtggacgccgacagcaagatcgtgcagctgagcgagatcagcatggacaacagccccaacctggcctggcccctgatcgtgaccgccctgagggccaacagcgccgtgaagctgcagtgatgactcgagctggtactgcatgcacgcaatgctagctgcccctttcccgtcctgggtaccccgagtctcccccgacctcgggtcccaggtatgctcccacctccacctgccccactcaccacctctgctagttccagacacctcccaagcacgcagcaatgcagctcaaaacgcttagcctagccacacccccacgggaaacagcagtgattaacctttagcaataaacgaaagtttaactaagctatactaaccccagggttggtcaatttcgtgccagccacaccctggagctagcaaaaaaaa

SEQ ID NO: 299 - DNA, 7528 bp, synthetic construct
  source 1..7528: mol_type = other DNA; note = Synthesized Vaccine Candidate 14
tagttattaatagtaatcaattacggggtcattagttcatagcccatatatggagttccgcgttacataacttacggtaaatggcccgcctggctgaccgcccaacgacccccgcccattgacgtcaataatgacgtatgttcccatagtaacgccaatagggactttccattgacgtcaatgggtggagtatttacggtaaactgcccacttggcagtacatcaagtgtatcatatgccaagtacgccccctattgacgtcaatgacggtaaatggcccgcctggcattatgcccagtacatgaccttatgggactttcctacttggcagtacatctacgtattagtcatcgctattaccatggtgatgcggttttggcagtacatcaatgggcgtggatagcggtttgactcacggggatttccaagtctccaccccattgacgtcaatgggagtttgttttggcaccaaaatcaacgggactttccaaaatgtcgtaacaactccgccccattgacgcaaatgggcggtaggcgtgtacggtgggaggtctatataagcagagctggtttagtgaaccgtcagatcgagaataaactagtattcttctggtccccacagactcagagagaacccgccaccatgttcgtgttcctggtgctgctgcccctggtgagcagccagtgcgtgaacctgaccaccaggacccagctgccccccgcctacaccaacagcttcaccaggggcgtgtactaccccgacaaggtgttcaggagcagcgtgctgcacagcacccaggacctgttcctgcccttcttcagcaacgtgacctggttccacgccatccacgtgagcggcaccaacggcaccaagaggttcgacaaccccgtgctgcccttcaacgacggcgtgtacttcgccagcaccgagaagagcaacatcatcaggggctggatcttcggcaccaccctggacagcaagacccagagcctgctgatcgtgaacaacgccaccaacgtggtgatcaaggtgtgcgagttccagttctgcaacgaccccttcctgggcgtgtactaccacaagaacaacaagagctggatggagagcgagttcagggtgtacagcagcgccaacaactgcaccttcgagtacgtgagccagcccttcctgatggacctggagggcaagcagggcaacttcaagaacctgagggagttcgtgttcaagaacatcgacggctacttcaagatctacagcaagcacacccccatcaacctggtgagggacctgccccagggcttcagcgccctggagcccctggtggacctgcccatcggcatcaacatcaccaggttccagaccctgctggccctgcacaggagctacctgacccccggcgacagcagcagcggctggaccgccggcgccgccgcctactacgtgggctacctgcagcccaggaccttcctgctgaagtacaacgagaacggcaccatcaccgacgccgtggactgcgccctggaccccctgagcgagaccaagtgcaccctgaagagcttcaccgtggagaagggcatctaccagaccagcaacttcagggtgcagcccaccgagagcatcgtgaggttccccaacatcaccaacctgtgccccttcggcgaggtgttcaacgccaccaggttcgccagcgtgtacgcctggaacaggaagaggatcagcaactgcgtggccgactacagcgtgctgtacaacagcgccagcttcagcaccttcaagtgctacggcgtgagccccaccaagctgaacgacctgtgcttcaccaacgtgtacgccgacagcttcgtgatcaggggcgacgaggtgaggcagatcgcccccggccagaccggcaagatcgccgactacaactacaagctgcccgacgacttcaccggctgcgtgatcgcctggaacagcaacaacctggacagcaaggtgggcggcaactacaactacctgtacaggctgttcaggaagagcaacctgaagcccttcgagagggacatcagcaccgagatctaccaggccggcagcaccccctgcaacggcgtggagggcttcaactgctacttccccctgcagagctacggcttccagcccaccaacggcgtgggctaccagccctacagggtggtggtgctgagcttcgagctgctgcacgcccccgccaccgtgtgcggccccaagaagagcaccaacctggtgaagaacaagtgcgtgaacttcaacttcaacggcctgaccggcaccggcgtgctgaccgagagcaacaagaagttcctgcccttccagcagttcggcagggacatcgccgacaccaccgacgccgtgagggacccccagaccctggagatcctggacatcaccccctgcagcttcggcggcgtgagcgtgatcacccccggcaccaacaccagcaaccaggtggccgtgctgtaccaggacgtgaactgcaccgaggtgcccgtggccatccacgccgaccagctgacccccacctggagggtgtacagcaccggcagcaacgtgttccagaccagggccggctgcctgatcggcgccgagcacgtgaacaacagctacgagtgcgacatccccatcggcgccggcatctgcgccagctaccagacccagaccaacagccccaggagggccaggagcgtggccagccagagcatcatcgcctacaccatgagcctgggcgccgagaacagcgtggcctacagcaacaacagcatcgccatccccaccaacttcaccatcagcgtgaccaccgagatcctgcccgtgagcatgaccaagaccagcgtggactgcaccatgtacatctgcggcgacagcaccgagtgcagcaacctgctgctgcagtacggcagcttctgcacccagctgaacagggccctgaccggcatcgccgtggagcaggacaagaacacccaggaggtgttcgcccaggtgaagcagatctacaagaccccccccatcaaggacttcggcggcttcaacttcagccagatcctgcccgaccccagcaagcccagcaagaggagcttcatcgaggacctgctgttcaacaaggtgaccctggccgacgccggcttcatcaagcagtacggcgactgcctgggcgacatcgccgccagggacctgatctgcgcccagaagttcaacggcctgaccgtgctgccccccctgctgaccgacgagatgatcgcccagtacaccagcgccctgctggccggcaccatcaccagcggctggaccttcggcgccggcgccgccctgcagatccccttcgccatgcagatggcctacaggttcaacggcatcggcgtgacccagaacgtgctgtacgagaaccagaagctgatcgccaaccagttcaacagcgccatcggcaagatccaggacagcctgagcagcaccgccagcgccctgggcaagctgcaggacgtggtgaaccagaacgcccaggccctgaacaccctggtgaagcagctgagcagcaacttcggcgccatcagcagcgtgctgaacgacatcctgagcaggctggacccccccgaggccgaggtgcagatcgacaggctgatcaccggcaggctgcagagcctgcagacctacgtgacccagcagctgatcagggccgccgagatcagggccagcgccaacctggccgccaccaagatgagcgagtgcgtgctgggccagagcaagagggtggacttctgcggcaagggctaccacctgatgagcttcccccagagcgccccccacggcgtggtgttcctgcacgtgacctacgtgcccgcccaggagaagaacttcaccaccgcccccgccatctgccacgacggcaaggcccacttccccagggagggcgtgttcgtgagcaacggcacccactggttcgtgacccagaggaacttctacgagccccagatcatcaccaccgacaacaccttcgtgagcggcaactgcgacgtggtgatcggcatcgtgaacaacaccgtgtacgaccccctgcagcccgagctggacagcttcaaggaggagctggacaagtacttcaagaaccacaccagccccgacgtggacctgggcgacatcagcggcatcaacgccagcgtggtgaacatccagaaggagatcgacaggctgaacgaggtggccaagaacctgaacgagagcctgatcgacctgcaggagctgggcaagtacgagcagtacatcaagtggccctggtacatctggctgggcttcatcgccggcctgatcgccatcgtgatggtgaccatcatgctgtgctgcatgaccagctgctgcagctgcctgaagggctgctgcagctgcggcagctgctgcaagttcgacgaggacgacagcgagcccgtgctgaagggcgtgaagctgcactacaccggaagcggagccacgaacttctctctgttaaagcaagcaggagatgttgaagaaaaccccgggcctaacaacgagctgagccccgtggccctgaggcagatgagctgcgccgccggcaccacccagaccgcctgcaccgacgacaacgccctggcctactacaacaccaccaagggcggcaggttcgtgctggccctgctgagcgacctgcaggacctgaagtgggccaggttccccaagagcgacggcaccggcaccatctacaccgagctggagcccccctgcaggttcgtgaccgacacccccaagggccccaaggtgaagtacctgtacttcatcaagggcctgaacaacctgaacaggggcatggtgctgggcagcctggccgccaccgtgaggctgcagggaagcggagagggcaggggaagtcttctaacatgcggggacgtggaggaaaatcccggccccgccggcaacgccaccgaggtgcccgccaacagcaccgtgctgagcttctgcgccttcgccgtggacgccgccaaggcctacaaggactacctggccagcggcggccagcccatcaccaactgcgtgaagatgctgtgcacccacaccggcaccggccaggccatcaccgtgacccccgaggccaacatggaccaggagagcttcggcggcgccagctgctgcctgtactgcaggtgccacatcgaccaccccaaccccaagggcttctgcgacctgaagggcaagtacgtgcagatccccaccacctgcgccaacgaccccgtgggcttcaccctgaagaacaccgtgtgcaccgtgtgcggcatgtggaagggctacggctgcagctgcgaccagctgagggagcccatgctgcagggaagcggacagtgtactaattatgctctcttgaaattggctggagatgttgagagcaacccaggtcccgccgtgggcgcctgcgtgctgtgcaacagccagaccagcctgaggtgcggcgcctgcatcaggaggcccttcctgtgctgcaagtgctgctacgaccacgtgatcagcaccagccacaagctggtgctgagcgtgaacccctacgtgtgcaacgcccccggctgcgacgtgaccgacgtgacccagctgtacctgggcggcatgagctactactgcaagagccacaagccccccatcagcttccccctgtgcgccaacggccaggtgttcggcctgtacaagaacacctgcgtgggcagcgacaacgtgaccgacttcaacgccatcgccacctgcgactggaccaacgccggcgactacatcctggccaacacctgcaccgagaggctgaagctgttcgccgccgagaccctgaaggccaccgaggagaccttcaagctgagctacggcatcgccaccgtgagggaggtgctgagcgacagggagctgcacctgagctgggaggtgggcaagcccaggccccccctgaacaggaactacgtgttcaccggctacagggtgaccaagaacagcaaggtgcagatcggcgagtacaccttcgagaagggcgactacggcgacgccgtggtgtacaggggcaccaccacctacaagctgaacgtgggcgactacttcgtgctgaccagccacaccgtgatgcccctgagcgcccccaccctggtgccccaggagcactacgtgaggatcaccggcctgtaccccaccctgaacatcagcgacgagttcagcagcaacgtggccaactaccagaaggtgggcatgcagaagtacagcaccctgcagggcccccccggcaccggcaagagccacttcgccatcggcctggccctgtactaccccagcgccaggatcgtgtacaccgcctgcagccacgccgccgtggacgccctgtgcgagaaggccctgaagtacctgcccatcgacaagtgcagcaggatcatccccgccagggccagggtggagtgcttcgacaagttcaaggtgaacagcaccctggagcagtacgtgttctgcaccgtgaacgccctgcccgagaccaccgccgacatcgtggtgttcgacgagatcagcatggccaccaactacgacctgagcgtggtgaacgccaggctgagggccaagcactacgtgtacatcggcgaccccgcccagctgcccgcccccaggaccctgctgaccaagggcaccctggagcccgagtacttcaacagcgtgtgcaggctgatgaagaccatcggccccgacatgttcctgggcacctgcaggaggtgccccgccgagatcgtggacaccgtgagcgccctggtgtacgacaacaagctgaaggcccacaaggacaagagcgcccagtgcttcaagatgttctacaagggcgtgatcacccacgacgtgagcagcgccatcaacaggccccagatcggcgtggtgagggagttcctgaccaggaaccccgcctggaggaaggccgtgttcatcagcccctacaacagccagaacgccgtggccagcaagatcctgggcctgcccacccagaccgtggacagcagccagggcagcgagtacgactacgtgatcttcacccagaccaccgagaccgcccacagctgcaacgtgaacaggttcaacgtggccatcaccagggccaaggtgggcatcctgtgcatcatgagcgacagggacctgtacgacaagctgcagttcaccagcctggagatccccaggaggaacgtggccaccctgcagtgatgactcgagctggtactgcatgcacgcaatgctagctgcccctttcccgtcctgggtaccccgagtctcccccgacctcgggtcccaggtatgctcccacctccacctgccccactcaccacctctgctagttccagacacctcccaagcacgcagcaatgcagctcaaaacgcttagcctagccacacccccacgggaaacagcagtgattaacctttagcaataaacgaaagtttaactaagctatactaaccccagggttggtcaatttcgtgccagccacaccctggagctagcaaaaaaaa

SEQ ID NO: 300 - DNA, 7528 bp, synthetic construct
  source 1..7528: mol_type = other DNA; note = Synthesized Vaccine Candidate 15
tagttattaatagtaatcaattacggggtcattagttcatagcccatatatggagttccgcgttacataacttacggtaaatggcccgcctggctgaccgcccaacgacccccgcccattgacgtcaataatgacgtatgttcccatagtaacgccaatagggactttccattgacgtcaatgggtggagtatttacggtaaactgcccacttggcagtacatcaagtgtatcatatgccaagtacgccccctattgacgtcaatgacggtaaatggcccgcctggcattatgcccagtacatgaccttatgggactttcctacttggcagtacatctacgtattagtcatcgctattaccatggtgatgcggttttggcagtacatcaatgggcgtggatagcggtttgactcacggggatttccaagtctccaccccattgacgtcaatgggagtttgttttggcaccaaaatcaacgggactttccaaaatgtcgtaacaactccgccccattgacgcaaatgggcggtaggcgtgtacggtgggaggtctatataagcagagctggtttagtgaaccgtcagatcgagaataaactagtattcttctggtccccacagactcagagagaacccgccaccatgttcgtgttcctggtgctgctgcccctggtgagcagccagtgcgtgaacctgaccaccaggacccagctgccccccgcctacaccaacagcttcaccaggggcgtgtactaccccgacaaggtgttcaggagcagcgtgctgcacagcacccaggacctgttcctgcccttcttcagcaacgtgacctggttccacgccatccacgtgagcggcaccaacggcaccaagaggttcgacaaccccgtgctgcccttcaacgacggcgtgtacttcgccagcaccgagaagagcaacatcatcaggggctggatcttcggcaccaccctggacagcaagacccagagcctgctgatcgtgaacaacgccaccaacgtggtgatcaaggtgtgcgagttccagttctgcaacgaccccttcctgggcgtgtactaccacaagaacaacaagagctggatggagagcgagttcagggtgtacagcagcgccaacaactgcaccttcgagtacgtgagccagcccttcctgatggacctggagggcaagcagggcaacttcaagaacctgagggagttcgtgttcaagaacatcgacggctacttcaagatctacagcaagcacacccccatcaacctggtgagggacctgccccagggcttcagcgccctggagcccctggtggacctgcccatcggcatcaacatcaccaggttccagaccctgctggccctgcacaggagctacctgacccccggcgacagcagcagcggctggaccgccggcgccgccgcctactacgtgggctacctgcagcccaggaccttcctgctgaagtacaacgagaacggcaccatcaccgacgccgtggactgcgccctggaccccctgagcgagaccaagtgcaccctgaagagcttcaccgtggagaagggcatctaccagaccagcaacttcagggtgcagcccaccgagagcatcgtgaggttccccaacatcaccaacctgtgccccttcggcgaggtgttcaacgccaccaggttcgccagcgtgtacgcctggaacaggaagaggatcagcaactgcgtggccgactacagcgtgctgtacaacagcgccagcttcagcaccttcaagtgctacggcgtgagccccaccaagctgaacgacctgtgcttcaccaacgtgtacgccgacagcttcgtgatcaggggcgacgaggtgaggcagatcgcccccggccagaccggcaagatcgccgactacaactacaagctgcccgacgacttcaccggctgcgtgatcgcctggaacagcaacaacctggacagcaaggtgggcggcaactacaactacctgtacaggctgttcaggaagagcaacctgaagcccttcgagagggacatcagcaccgagatctaccaggccggcagcaccccctgcaacggcgtggagggcttcaactgctacttccccctgcagagctacggcttccagcccaccaacggcgtgggctaccagccctacagggtggtggtgctgagcttcgagctgctgcacgcccccgccaccgtgtgcggccccaagaagagcaccaacctggtgaagaacaagtgcgtgaacttcaacttcaacggcctgaccggcaccggcgtgctgaccgagagcaacaagaagttcctgcccttccagcagttcggcagggacatcgccgacaccaccgacgccgtgagggacccccagaccctggagatcctggacatcaccccctgcagcttcggcggcgtgagcgtgatcacccccggcaccaacaccagcaaccaggtggccgtgctgtaccaggacgtgaactgcaccgaggtgcccgtggccatccacgccgaccagctgacccccacctggagggtgtacagcaccggcagcaacgtgttccagaccagggccggctgcctgatcggcgccgagcacgtgaacaacagctacgagtgcgacatccccatcggcgccggcatctgcgccagctaccagacccagaccaacagccccggcagcgccagcagcgtggccagccagagcatcatcgcctacaccatgagcctgggcgccgagaacagcgtggcctacagcaacaacagcatcgccatccccaccaacttcaccatcagcgtgaccaccgagatcctgcccgtgagcatgaccaagaccagcgtggactgcaccatgtacatctgcggcgacagcaccgagtgcagcaacctgctgctgcagtacggcagcttctgcacccagctgaacagggccctgaccggcatcgccgtggagcaggacaagaacacccaggaggtgttcgcccaggtgaagcagatctacaagaccccccccatcaaggacttcggcggcttcaacttcagccagatcctgcccgaccccagcaagcccagcaagaggagccccatcgaggacctgctgttcaacaaggtgaccctggccgacgccggcttcatcaagcagtacggcgactgcctgggcgacatcgccgccagggacctgatctgcgcccagaagttcaacggcctgaccgtgctgccccccctgctgaccgacgagatgatcgcccagtacaccagcgccctgctggccggcaccatcaccagcggctggaccttcggcgccggccccgccctgcagatccccttccccatgcagatggcctacaggttcaacggcatcggcgtgacccagaacgtgctgtacgagaaccagaagctgatcgccaaccagttcaacagcgccatcggcaagatccaggacagcctgagcagcacccccagcgccctgggcaagctgcaggacgtggtgaaccagaacgcccaggccctgaacaccctggtgaagcagctgagcagcaacttcggcgccatcagcagcgtgctgaacgacatcctgagcaggctggacccccccgaggccgaggtgcagatcgacaggctgatcaccggcaggctgcagagcctgcagacctacgtgacccagcagctgatcagggccgccgagatcagggccagcgccaacctggccgccaccaagatgagcgagtgcgtgctgggccagagcaagagggtggacttctgcggcaagggctaccacctgatgagcttcccccagagcgccccccacggcgtggtgttcctgcacgtgacctacgtgcccgcccaggagaagaacttcaccaccgcccccgccatctgccacgacggcaaggcccacttccccagggagggcgtgttcgtgagcaacggcacccactggttcgtgacccagaggaacttctacgagccccagatcatcaccaccgacaacaccttcgtgagcggcaactgcgacgtggtgatcggcatcgtgaacaacaccgtgtacgaccccctgcagcccgagctggacagcttcaaggaggagctggacaagtacttcaagaaccacaccagccccgacgtggacctgggcgacatcagcggcatcaacgccagcgtggtgaacatccagaaggagatcgacaggctgaacgaggtggccaagaacctgaacgagagcctgatcgacctgcaggagctgggcaagtacgagcagtacatcaagtggccctggtacatctggctgggcttcatcgccggcctgatcgccatcgtgatggtgaccatcatgctgtgctgcatgaccagctgctgcagctgcctgaagggctgctgcagctgcggcagctgctgcaagttcgacgaggacgacagcgagcccgtgctgaagggcgtgaagctgcactacaccggaagcggagccacgaacttctctctgttaaagcaagcaggagatgttgaagaaaaccccgggcctaacaacgagctgagccccgtggccctgaggcagatgagctgcgccgccggcaccacccagaccgcctgcaccgacgacaacgccctggcctactacaacaccaccaagggcggcaggttcgtgctggccctgctgagcgacctgcaggacctgaagtgggccaggttccccaagagcgacggcaccggcaccatctacaccgagctggagcccccctgcaggttcgtgaccgacacccccaagggccccaaggtgaagtacctgtacttcatcaagggcctgaacaacctgaacaggggcatggtgctgggcagcctggccgccaccgtgaggctgcagggaagcggagagggcaggggaagtcttctaacatgcggggacgtggaggaaaatcccggccccgccggcaacgccaccgaggtgcccgccaacagcaccgtgctgagcttctgcgccttcgccgtggacgccgccaaggcctacaaggactacctggccagcggcggccagcccatcaccaactgcgtgaagatgctgtgcacccacaccggcaccggccaggccatcaccgtgacccccgaggccaacatggaccaggagagcttcggcggcgccagctgctgcctgtactgcaggtgccacatcgaccaccccaaccccaagggcttctgcgacctgaagggcaagtacgtgcagatccccaccacctgcgccaacgaccccgtgggcttcaccctgaagaacaccgtgtgcaccgtgtgcggcatgtggaagggctacggctgcagctgcgaccagctgagggagcccatgctgcagggaagcggacagtgtactaattatgctctcttgaaattggctggagatgttgagagcaacccaggtcccgccgtgggcgcctgcgtgctgtgcaacagccagaccagcctgaggtgcggcgcctgcatcaggaggcccttcctgtgctgcaagtgctgctacgaccacgtgatcagcaccagccacaagctggtgctgagcgtgaacccctacgtgtgcaacgcccccggctgcgacgtgaccgacgtgacccagctgtacctgggcggcatgagctactactgcaagagccacaagccccccatcagcttccccctgtgcgccaacggccaggtgttcggcctgtacaagaacacctgcgtgggcagcgacaacgtgaccgacttcaacgccatcgccacctgcgactggaccaacgccggcgactacatcctggccaacacctgcaccgagaggctgaagctgttcgccgccgagaccctgaaggccaccgaggagaccttcaagctgagctacggcatcgccaccgtgagggaggtgctgagcgacagggagctgcacctgagctgggaggtgggcaagcccaggccccccctgaacaggaactacgtgttcaccggctacagggtgaccaagaacagcaaggtgcagatcggcgagtacaccttcgagaagggcgactacggcgacgccgtggtgtacaggggcaccaccacctacaagctgaacgtgggcgactacttcgtgctgaccagccacaccgtgatgcccctgagcgcccccaccctggtgccccaggagcactacgtgaggatcaccggcctgtaccccaccctgaacatcagcgacgagttcagcagcaacgtggccaactaccagaaggtgggcatgcagaagtacagcaccctgcagggcccccccggcaccggcaagagccacttcgccatcggcctggccctgtactaccccagcgccaggatcgtgtacaccgcctgcagccacgccgccgtggacgccctgtgcgagaaggccctgaagtacctgcccatcgacaagtgcagcaggatcatccccgccagggccagggtggagtgcttcgacaagttcaaggtgaacagcaccctggagcagtacgtgttctgcaccgtgaacgccctgcccgagaccaccgccgacatcgtggtgttcgacgagatcagcatggccaccaactacgacctgagcgtggtgaacgccaggctgagggccaagcactacgtgtacatcggcgaccccgcccagctgcccgcccccaggaccctgctgaccaagggcaccctggagcccgagtacttcaacagcgtgtgcaggctgatgaagaccatcggccccgacatgttcctgggcacctgcaggaggtgccccgccgagatcgtggacaccgtgagcgccctggtgtacgacaacaagctgaaggcccacaaggacaagagcgcccagtgcttcaagatgttctacaagggcgtgatcacccacgacgtgagcagcgccatcaacaggccccagatcggcgtggtgagggagttcctgaccaggaaccccgcctggaggaaggccgtgttcatcagcccctacaacagccagaacgccgtggccagcaagatcctgggcctgcccacccagaccgtggacagcagccagggcagcgagtacgactacgtgatcttcacccagaccaccgagaccgcccacagctgcaacgtgaacaggttcaacgtggccatcaccagggccaaggtgggcatcctgtgcatcatgagcgacagggacctgtacgacaagctgcagttcaccagcctggagatccccaggaggaacgtggccaccctgcagtgatgactcgagctggtactgcatgcacgcaatgctagctgcccctttcccgtcctgggtaccccgagtctcccccgacctcgggtcccaggtatgctcccacctccacctgccccactcaccacctctgctagttccagacacctcccaagcacgcagcaatgcagctcaaaacgcttagcctagccacacccccacgggaaacagcagtgattaacctttagcaataaacgaaagtttaactaagctatactaaccccagggttggtcaatttcgtgccagccacaccctggagctagcaaaaaaaa

SEQ ID NO: 301 - DNA, 7519 bp, synthetic construct
  source 1..7519: mol_type = other DNA; note = Synthesized Vaccine Candidate 16
tagttattaatagtaatcaattacggggtcattagttcatagcccatatatggagttccgcgttacataacttacggtaaatggcccgcctggctgaccgcccaacgacccccgcccattgacgtcaataatgacgtatgttcccatagtaacgccaatagggactttccattgacgtcaatgggtggagtatttacggtaaactgcccacttggcagtacatcaagtgtatcatatgccaagtacgccccctattgacgtcaatgacggtaaatggcccgcctggcattatgcccagtacatgaccttatgggactttcctacttggcagtacatctacgtattagtcatcgctattaccatggtgatgcggttttggcagtacatcaatgggcgtggatagcggtttgactcacggggatttccaagtctccaccccattgacgtcaatgggagtttgttttggcaccaaaatcaacgggactttccaaaatgtcgtaacaactccgccccattgacgcaaatgggcggtaggcgtgtacggtgggaggtctatataagcagagctggtttagtgaaccgtcagatcgagaataaactagtattcttctggtccccacagactcagagagaacccgccaccatgttcgtgttcctggtgctgctgcccctggtgagcagccagtgcgtgaacctgaccaccaggacccagctgccccccgcctacaccaacagcttcaccaggggcgtgtactaccccgacaaggtgttcaggagcagcgtgctgcacagcacccaggacctgttcctgcccttcttcagcaacgtgacctggttccacgccatccacgtgagcggcaccaacggcaccaagaggttcgacaaccccgtgctgcccttcaacgacggcgtgtacttcgccagcaccgagaagagcaacatcatcaggggctggatcttcggcaccaccctggacagcaagacccagagcctgctgatcgtgaacaacgccaccaacgtggtgatcaaggtgtgcgagttccagttctgcaacgaccccttcctgggcgtgtactaccacaagaacaacaagagctggatggagagcgagttcagggtgtacagcagcgccaacaactgcaccttcgagtacgtgagccagcccttcctgatggacctggagggcaagcagggcaacttcaagaacctgagggagttcgtgttcaagaacatcgacggctacttcaagatctacagcaagcacacccccatcaacctggtgagggacctgccccagggcttcagcgccctggagcccctggtggacctgcccatcggcatcaacatcaccaggttccagaccctgctggccctgcacaggagctacctgacccccggcgacagcagcagcggctggaccgccggcgccgccgcctactacgtgggctacctgcagcccaggaccttcctgctgaagtacaacgagaacggcaccatcaccgacgccgtggactgcgccctggaccccctgagcgagaccaagtgcaccctgaagagcttcaccgtggagaagggcatctaccagaccagcaacttcagggtgcagcccaccgagagcatcgtgaggttccccaacatcaccaacctgtgccccttcggcgaggtgttcaacgccaccaggttcgccagcgtgtacgcctggaacaggaagaggatcagcaactgcgtggccgactacagcgtgctgtacaacagcgccagcttcagcaccttcaagtgctacggcgtgagccccaccaagctgaacgacctgtgcttcaccaacgtgtacgccgacagcttcgtgatcaggggcgacgaggtgaggcagatcgcccccggccagaccggcaagatcgccgactacaactacaagctgcccgacgacttcaccggctgcgtgatcgcctggaacagcaacaacctggacagcaaggtgggcggcaactacaactacctgtacaggctgttcaggaagagcaacctgaagcccttcgagagggacatcagcaccgagatctaccaggccggcagcaccccctgcaacggcgtggagggcttcaactgctacttccccctgcagagctacggcttccagcccaccaacggcgtgggctaccagccctacagggtggtggtgctgagcttcgagctgctgcacgcccccgccaccgtgtgcggccccaagaagagcaccaacctggtgaagaacaagtgcgtgaacttcaacttcaacggcctgaccggcaccggcgtgctgaccgagagcaacaagaagttcctgcccttccagcagttcggcagggacatcgccgacaccaccgacgccgtgagggacccccagaccctggagatcctggacatcaccccctgcagcttcggcggcgtgagcgtgatcacccccggcaccaacaccagcaaccaggtggccgtgctgtaccaggacgtgaactgcaccgaggtgcccgtggccatccacgccgaccagctgacccccacctggagggtgtacagcaccggcagcaacgtgttccagaccagggccggctgcctgatcggcgccgagcacgtgaacaacagctacgagtgcgacatccccatcggcgccggcatctgcgccagctaccagacccagaccaacagccccaggagggccaggagcgtggccagccagagcatcatcgcctacaccatgagcctgggcgccgagaacagcgtggcctacagcaacaacagcatcgccatccccaccaacttcaccatcagcgtgaccaccgagatcctgcccgtgagcatgaccaagaccagcgtggactgcaccatgtacatctgcggcgacagcaccgagtgcagcaacctgctgctgcagtacggcagcttctgcacccagctgaacagggccctgaccggcatcgccgtggagcaggacaagaacacccaggaggtgttcgcccaggtgaagcagatctacaagaccccccccatcaaggacttcggcggcttcaacttcagccagatcctgcccgaccccagcaagcccagcaagaggagcttcatcgaggacctgctgttcaacaaggtgaccctggccgacgccggcttcatcaagcagtacggcgactgcctgggcgacatcgccgccagggacctgatctgcgcccagaagttcaacggcctgaccgtgctgccccccctgctgaccgacgagatgatcgcccagtacaccagcgccctgctggccggcaccatcaccagcggctggaccttcggcgccggcgccgccctgcagatccccttcgccatgcagatggcctacaggttcaacggcatcggcgtgacccagaacgtgctgtacgagaaccagaagctgatcgccaaccagttcaacagcgccatcggcaagatccaggacagcctgagcagcaccgccagcgccctgggcaagctgcaggacgtggtgaaccagaacgcccaggccctgaacaccctggtgaagcagctgagcagcaacttcggcgccatcagcagcgtgctgaacgacatcctgagcaggctggacccccccgaggccgaggtgcagatcgacaggctgatcaccggcaggctgcagagcctgcagacctacgtgacccagcagctgatcagggccgccgagatcagggccagcgccaacctggccgccaccaagatgagcgagtgcgtgctgggccagagcaagagggtggacttctgcggcaagggctaccacctgatgagcttcccccagagcgccccccacggcgtggtgttcctgcacgtgacctacgtgcccgcccaggagaagaacttcaccaccgcccccgccatctgccacgacggcaaggcccacttccccagggagggcgtgttcgtgagcaacggcacccactggttcgtgacccagaggaacttctacgagccccagatcatcaccaccgacaacaccttcgtgagcggcaactgcgacgtggtgatcggcatcgtgaacaacaccgtgtacgaccccctgcagcccgagctggacagcttcaaggaggagctggacaagtacttcaagaaccacaccagccccgacgtggacctgggcgacatcagcggcatcaacgccagcgtggtgaacatccagaaggagatcgacaggctgaacgaggtggccaagaacctgaacgagagcctgatcgacctgcaggagctgggcaagtacgagcagtacatcaagtggccctggtacatctggctgggcttcatcgccggcctgatcgccatcgtgatggtgaccatcatgctgtgctgcatgaccagctgctgcagctgcctgaagggctgctgcagctgcggcagctgctgcaagttcgacgaggacgacagcgagcccgtgctgaagggcgtgaagctgcactacaccggaagcggagccacgaacttctctctgttaaagcaagcaggagatgttgaagaaaaccccgggcctgccgagaacgtgaccggcctgttcaaggactgcagcaaggtgatcaccggcctgcaccccacccaggcccccacccacctgagcgtggacaccaagttcaagaccgagggcctgtgcgtggacatccccggcatccccaaggacatgacctacaggaggctgatcagcatgatgggcttcaagatgaactaccaggtgaacggctaccccaacatgttcatcaccagggaggaggccatcaggcacgtgagggcctggatcggcttcgacgtggagggctgccacgccaccagggaggccgtgggcaccaacctgcccctgcagctgggcttcagcaccggcgtgaacctggtggccgtgcccaccggctacgtggacacccccaacaacaccgacttcagcagggtgagcgccaagcccccccccggcgaccagttcaagcacctgatccccctgatgtacaagggcctgccctggaacgtggtgaggatcaagatcgtgcagatgctgagcgacaccctgaagaacctgagcgacagggtggtgttcgtgctgtgggcccacggcttcgagctgaccagcatgaagtacttcgtgaagatcggccccgagaggacctgctgcctgtgcgacaggagggccacctgcttcagcaccgccagcgacacctacgcctgctggcaccacagcatcggcttcgactacgtgtacaaccccttcatgatcgacgtgcagcagtggggcttcaccggcaacctgcagagcaaccacgacctgtactgccaggtgcacggcaacgcccacgtggccagctgcgacgccatcatgaccaggtgcctggccgtgcacgagtgcttcgtgaagagggtggactggaccatcgagtaccccatcatcggcgacgagctgaagatcaacgccgcctgcaggaaggtgcagcacatggtggtgaaggccgccctgctggccgacaagttccccgtgctgcacgacatcggcaaccccaaggccatcaagtgcgtgccccaggccgacgtggagtggaagttctacgacgcccagccctgcagcgacaaggcctacaagatcgaggagctgttctacagctacgccacccacagcgacaagttcaccgacggcgtgtgcctgttctggaactgcaacgtggacaggtaccccgccaacagcatcgtgtgcaggttcgacaccagggtgctgagcaacctgaacctgcccggctgcgacggcggcagcctgtacgtgaacaagcacgccttccacacccccgccttcgacaagagcgccttcgtgaacctgaagcagctgcccttcttctactacagcgacagcccctgcgagagccacggcaagcaggtggtgagcgacatcgactacgtgcccctgaagagcgccacctgcatcaccaggtgcaacctgggcggcgccgtgtgcaggcaccacgccaacgagtacaggctgtacctggacgcctacaacatgatgatcagcgccggcttcagcctgtgggtgtacaagcagttcgacacctacaacctgtggaacaccttcaccaggctgcagggaagcggagagggcaggggaagtcttctaacatgcggggacgtggaggaaaatcccggccccagcctggagaacgtggccttcaacgtggtgaacaagggccacttcgacggccagcagggcgaggtgcccgtgagcatcatcaacaacaccgtgtacaccaaggtggacggcgtggacgtggagctgttcgagaacaagaccaccctgcccgtgaacgtggccttcgagctgtgggccaagaggaacatcaagcccgtgcccgaggtgaagatcctgaacaacctgggcgtggacatcgccgccaacaccgtgatctgggactacaagagggacgcccccgcccacatcagcaccatcggcgtgtgcagcatgaccgacatcgccaagaagcccaccgagaccatctgcgcccccctgaccgtgttcttcgacggcagggtggacggccaggtggacctgttcaggaacgccaggaacggcgtgctgatcaccgagggcagcgtgaagggcctgcagcccagcgtgggccccaagcaggccagcctgaacggcgtgaccctgatcggcgaggccgtgaagacccagttcaactactacaagaaggtggacggcgtggtgcagcagctgcccgagacctacttcacccagagcaggaacctgcaggagttcaagcccaggagccagatggagatcgacttcctggagctggccatggacgagttcatcgagaggtacaagctggagggctacgccttcgagcacatcgtgtacggcgacttcagccacagccagctgggcggcctgcacctgctgatcggcctggccaagaggttcaaggagagccccttcgagctggaggacttcatccccatggacagcaccgtgaagaactacttcatcaccgacgcccagaccggcagcagcaagtgcgtgtgcagcgtgatcgacctgctgctggacgacttcgtggagatcatcaagagccaggacctgagcgtggtgagcaaggtggtgaaggtgaccatcgactacaccgagatcagcttcatgctgtggtgcaaggacggccacgtggagaccttctaccccaagctgcagtgatgactcgagctggtactgcatgcacgcaatgctagctgcccctttcccgtcctgggtaccccgagtctcccccgacctcgggtcccaggtatgctcccacctccacctgccccactcaccacctctgctagttccagacacctcccaagcacgcagcaatgcagctcaaaacgcttagcctagccacacccccacgggaaacagcagtgattaacctttagcaataaacgaaagtttaactaagctatactaaccccagggttggtcaatttcgtgccagccacaccctggagctagcaaaaaaaa

SEQ ID NO: 302 - DNA, 7519 bp, synthetic construct
  source 1..7519: mol_type = other DNA; note = Synthesized Vaccine Candidate 17
tagttattaatagtaatcaattacggggtcattagttcatagcccatatatggagttccgcgttacataacttacggtaaatggcccgcctggctgaccgcccaacgacccccgcccattgacgtcaataatgacgtatgttcccatagtaacgccaatagggactttccattgacgtcaatgggtggagtatttacggtaaactgcccacttggcagtacatcaagtgtatcatatgccaagtacgccccctattgacgtcaatgacggtaaatggcccgcctggcattatgcccagtacatgaccttatgggactttcctacttggcagtacatctacgtattagtcatcgctattaccatggtgatgcggttttggcagtacatcaatgggcgtggatagcggtttgactcacggggatttccaagtctccaccccattgacgtcaatgggagtttgttttggcaccaaaatcaacgggactttccaaaatgtcgtaacaactccgccccattgacgcaaatgggcggtaggcgtgtacggtgggaggtctatataagcagagctggtttagtgaaccgtcagatcgagaataaactagtattcttctggtccccacagactcagagagaacccgccaccatgttcgtgttcctggtgctgctgcccctggtgagcagccagtgcgtgaacctgaccaccaggacccagctgccccccgcctacaccaacagcttcaccaggggcgtgtactaccccgacaaggtgttcaggagcagcgtgctgcacagcacccaggacctgttcctgcccttcttcagcaacgtgacctggttccacgccatccacgtgagcggcaccaacggcaccaagaggttcgacaaccccgtgctgcccttcaacgacggcgtgtacttcgccagcaccgagaagagcaacatcatcaggggctggatcttcggcaccaccctggacagcaagacccagagcctgctgatcgtgaacaacgccaccaacgtggtgatcaaggtgtgcgagttccagttctgcaacgaccccttcctgggcgtgtactaccacaagaacaacaagagctggatggagagcgagttcagggtgtacagcagcgccaacaactgcaccttcgagtacgtgagccagcccttcctgatggacctggagggcaagcagggcaacttcaagaacctgagggagttcgtgttcaagaacatcgacggctacttcaagatctacagcaagcacacccccatcaacctggtgagggacctgccccagggcttcagcgccctggagcccctggtggacctgcccatcggcatcaacatcaccaggttccagaccctgctggccctgcacaggagctacctgacccccggcgacagcagcagcggctggaccgccggcgccgccgcctactacgtgggctacctgcagcccaggaccttcctgctgaagtacaacgagaacggcaccatcaccgacgccgtggactgcgccctggaccccctgagcgagaccaagtgcaccctgaagagcttcaccgtggagaagggcatctaccagaccagcaacttcagggtgcagcccaccgagagcatcgtgaggttccccaacatcaccaacctgtgccccttcggcgaggtgttcaacgccaccaggttcgccagcgtgtacgcctggaacaggaagaggatcagcaactgcgtggccgactacagcgtgctgtacaacagcgccagcttcagcaccttcaagtgctacggcgtgagccccaccaagctgaacgacctgtgcttcaccaacgtgtacgccgacagcttcgtgatcaggggcgacgaggtgaggcagatcgcccccggccagaccggcaagatcgccgactacaactacaagctgcccgacgacttcaccggctgcgtgatcgcctggaacagcaacaacctggacagcaaggtgggcggcaactacaactacctgtacaggctgttcaggaagagcaacctgaagcccttcgagagggacatcagcaccgagatctaccaggccggcagcaccccctgcaacggcgtggagggcttcaactgctacttccccctgcagagctacggcttccagcccaccaacggcgtgggctaccagccctacagggtggtggtgctgagcttcgagctgctgcacgcccccgccaccgtgtgcggccccaagaagagcaccaacctggtgaagaacaagtgcgtgaacttcaacttcaacggcctgaccggcaccggcgtgctgaccgagagcaacaagaagttcctgcccttccagcagttcggcagggacatcgccgacaccaccgacgccgtgagggacccccagaccctggagatcctggacatcaccccctgcagcttcggcggcgtgagcgtgatcacccccggcaccaacaccagcaaccaggtggccgtgctgtaccaggacgtgaactgcaccgaggtgcccgtggccatccacgccgaccagctgacccccacctggagggtgtacagcaccggcagcaacgtgttccagaccagggccggctgcctgatcggcgccgagcacgtgaacaacagctacgagtgcgacatccccatcggcgccggcatctgcgccagctaccagacccagaccaacagccccggcagcgccagcagcgtggccagccagagcatcatcgcctacaccatgagcctgggcgccgagaacagcgtggcctacagcaacaacagcatcgccatccccaccaacttcaccatcagcgtgaccaccgagatcctgcccgtgagcatgaccaagaccagcgtggactgcaccatgtacatctgcggcgacagcaccgagtgcagcaacctgctgctgcagtacggcagcttctgcacccagctgaacagggccctgaccggcatcgccgtggagcaggacaagaacacccaggaggtgttcgcccaggtgaagcagatctacaagaccccccccatcaaggacttcggcggcttcaacttcagccagatcctgcccgaccccagcaagcccagcaagaggagccccatcgaggacctgctgttcaacaaggtgaccctggccgacgccggcttcatcaagcagtacggcgactgcctgggcgacatcgccgccagggacctgatctgcgcccagaagttcaacggcctgaccgtgctgccccccctgctgaccgacgagatgatcgcccagtacaccagcgccctgctggccggcaccatcaccagcggctggaccttcggcgccggccccgccctgcagatccccttccccatgcagatggcctacaggttcaacggcatcggcgtgacccagaacgtgctgtacgagaaccagaagctgatcgccaaccagttcaacagcgccatcggcaagatccaggacagcctgagcagcacccccagcgccctgggcaagctgcaggacgtggtgaaccagaacgcccaggccctgaacaccctggtgaagcagctgagcagcaacttcggcgccatcagcagcgtgctgaacgacatcctgagcaggctggacccccccgaggccgaggtgcagatcgacaggctgatcaccggcaggctgcagagcctgcagacctacgtgacccagcagctgatcagggccgccgagatcagggccagcgccaacctggccgccaccaagatgagcgagtgcgtgctgggccagagcaagagggtggacttctgcggcaagggctaccacctgatgagcttcccccagagcgccccccacggcgtggtgttcctgcacgtgacctacgtgcccgcccaggagaagaacttcaccaccgcccccgccatctgccacgacggcaaggcccacttccccagggagggcgtgttcgtgagcaacggcacccactggttcgtgacccagaggaacttctacgagccccagatcatcaccaccgacaacaccttcgtgagcggcaactgcgacgtggtgatcggcatcgtgaacaacaccgtgtacgaccccctgcagcccgagctggacagcttcaaggaggagctggacaagtacttcaagaaccacaccagccccgacgtggacctgggcgacatcagcggcatcaacgccagcgtggtgaacatccagaaggagatcgacaggctgaacgaggtggccaagaacctgaacgagagcctgatcgacctgcaggagctgggcaagtacgagcagtacatcaagtggccctggtacatctggctgggcttcatcgccggcctgatcgccatcgtgatggtgaccatcatgctgtgctgcatgaccagctgctgcagctgcctgaagggctgctgcagctgcggcagctgctgcaagttcgacgaggacgacagcgagcccgtgctgaagggcgtgaagctgcactacaccggaagcggagccacgaacttctctctgttaaagcaagcaggagatgttgaagaaaaccccgggcctgccgagaacgtgaccggcctgttcaaggactgcagcaaggtgatcaccggcctgcaccccacccaggcccccacccacctgagcgtggacaccaagttcaagaccgagggcctgtgcgtggacatccccggcatccccaaggacatgacctacaggaggctgatcagcatgatgggcttcaagatgaactaccaggtgaacggctaccccaacatgttcatcaccagggaggaggccatcaggcacgtgagggcctggatcggcttcgacgtggagggctgccacgccaccagggaggccgtgggcaccaacctgcccctgcagctgggcttcagcaccggcgtgaacctggtggccgtgcccaccggctacgtggacacccccaacaacaccgacttcagcagggtgagcgccaagcccccccccggcgaccagttcaagcacctgatccccctgatgtacaagggcctgccctggaacgtggtgaggatcaagatcgtgcagatgctgagcgacaccctgaagaacctgagcgacagggtggtgttcgtgctgtgggcccacggcttcgagctgaccagcatgaagtacttcgtgaagatcggccccgagaggacctgctgcctgtgcgacaggagggccacctgcttcagcaccgccagcgacacctacgcctgctggcaccacagcatcggcttcgactacgtgtacaaccccttcatgatcgacgtgcagcagtggggcttcaccggcaacctgcagagcaaccacgacctgtactgccaggtgcacggcaacgcccacgtggccagctgcgacgccatcatgaccaggtgcctggccgtgcacgagtgcttcgtgaagagggtggactggaccatcgagtaccccatcatcggcgacgagctgaagatcaacgccgcctgcaggaaggtgcagcacatggtggtgaaggccgccctgctggccgacaagttccccgtgctgcacgacatcggcaaccccaaggccatcaagtgcgtgccccaggccgacgtggagtggaagttctacgacgcccagccctgcagcgacaaggcctacaagatcgaggagctgttctacagctacgccacccacagcgacaagttcaccgacggcgtgtgcctgttctggaactgcaacgtggacaggtaccccgccaacagcatcgtgtgcaggttcgacaccagggtgctgagcaacctgaacctgcccggctgcgacggcggcagcctgtacgtgaacaagcacgccttccacacccccgccttcgacaagagcgccttcgtgaacctgaagcagctgcccttcttctactacagcgacagcccctgcgagagccacggcaagcaggtggtgagcgacatcgactacgtgcccctgaagagcgccacctgcatcaccaggtgcaacctgggcggcgccgtgtgcaggcaccacgccaacgagtacaggctgtacctggacgcctacaacatgatgatcagcgccggcttcagcctgtgggtgtacaagcagttcgacacctacaacctgtggaacaccttcaccaggctgcagggaagcggagagggcaggggaagtcttctaacatgcggggacgtggaggaaaatcccggccccagcctggagaacgtggccttcaacgtggtgaacaagggccacttcgacggccagcagggcgaggtgcccgtgagcatcatcaacaacaccgtgtacaccaaggtggacggcgtggacgtggagctgttcgagaacaagaccaccctgcccgtgaacgtggccttcgagctgtgggccaagaggaacatcaagcccgtgcccgaggtgaagatcctgaacaacctgggcgtggacatcgccgccaacaccgtgatctgggactacaagagggacgcccccgcccacatcagcaccatcggcgtgtgcagcatgaccgacatcgccaagaagcccaccgagaccatctgcgcccccctgaccgtgttcttcgacggcagggtggacggccaggtggacctgttcaggaacgccaggaacggcgtgctgatcaccgagggcagcgtgaagggcctgcagcccagcgtgggccccaagcaggccagcctgaacggcgtgaccctgatcggcgaggccgtgaagacccagttcaactactacaagaaggtggacggcgtggtgcagcagctgcccgagacctacttcacccagagcaggaacctgcaggagttcaagcccaggagccagatggagatcgacttcctggagctggccatggacgagttcatcgagaggtacaagctggagggctacgccttcgagcacatcgtgtacggcgacttcagccacagccagctgggcggcctgcacctgctgatcggcctggccaagaggttcaaggagagccccttcgagctggaggacttcatccccatggacagcaccgtgaagaactacttcatcaccgacgcccagaccggcagcagcaagtgcgtgtgcagcgtgatcgacctgctgctggacgacttcgtggagatcatcaagagccaggacctgagcgtggtgagcaaggtggtgaaggtgaccatcgactacaccgagatcagcttcatgctgtggtgcaaggacggccacgtggagaccttctaccccaagctgcagtgatgactcgagctggtactgcatgcacgcaatgctagctgcccctttcccgtcctgggtaccccgagtctcccccgacctcgggtcccaggtatgctcccacctccacctgccccactcaccacctctgctagttccagacacctcccaagcacgcagcaatgcagctcaaaacgcttagcctagccacacccccacgggaaacagcagtgattaacctttagcaataaacgaaagtttaactaagctatactaaccccagggttggtcaatttcgtgccagccacaccctggagctagcaaaaaaaa

SEQ ID NO: 303 - DNA, 5731 bp, synthetic construct
  source 1..5731: mol_type = other DNA; note = Synthesized Vaccine Candidate 18
tagttattaatagtaatcaattacggggtcattagttcatagcccatatatggagttccgcgttacataacttacggtaaatggcccgcctggctgaccgcccaacgacccccgcccattgacgtcaataatgacgtatgttcccatagtaacgccaatagggactttccattgacgtcaatgggtggagtatttacggtaaactgcccacttggcagtacatcaagtgtatcatatgccaagtacgccccctattgacgtcaatgacggtaaatggcccgcctggcattatgcccagtacatgaccttatgggactttcctacttggcagtacatctacgtattagtcatcgctattaccatggtgatgcggttttggcagtacatcaatgggcgtggatagcggtttgactcacggggatttccaagtctccaccccattgacgtcaatgggagtttgttttggcaccaaaatcaacgggactttccaaaatgtcgtaacaactccgccccattgacgcaaatgggcggtaggcgtgtacggtgggaggtctatataagcagagctggtttagtgaaccgtcagatcgagaataaactagtattcttctggtccccacagactcagagagaacccgccaccatgttcgtgttcctggtgctgctgcccctggtgagcagccagtgcgtgaacctgaccaccaggacccagctgccccccgcctacaccaacagcttcaccaggggcgtgtactaccccgacaaggtgttcaggagcagcgtgctgcacagcacccaggacctgttcctgcccttcttcagcaacgtgacctggttccacgccatccacgtgagcggcaccaacggcaccaagaggttcgacaaccccgtgctgcccttcaacgacggcgtgtacttcgccagcaccgagaagagcaacatcatcaggggctggatcttcggcaccaccctggacagcaagacccagagcctgctgatcgtgaacaacgccaccaacgtggtgatcaaggtgtgcgagttccagttctgcaacgaccccttcctgggcgtgtactaccacaagaacaacaagagctggatggagagcgagttcagggtgtacagcagcgccaacaactgcaccttcgagtacgtgagccagcccttcctgatggacctggagggcaagcagggcaacttcaagaacctgagggagttcgtgttcaagaacatcgacggctacttcaagatctacagcaagcacacccccatcaacctggtgagggacctgccccagggcttcagcgccctggagcccctggtggacctgcccatcggcatcaacatcaccaggttccagaccctgctggccctgcacaggagctacctgacccccggcgacagcagcagcggctggaccgccggcgccgccgcctactacgtgggctacctgcagcccaggaccttcctgctgaagtacaacgagaacggcaccatcaccgacgccgtggactgcgccctggaccccctgagcgagaccaagtgcaccctgaagagcttcaccgtggagaagggcatctaccagaccagcaacttcagggtgcagcccaccgagagcatcgtgaggttccccaacatcaccaacctgtgccccttcggcgaggtgttcaacgccaccaggttcgccagcgtgtacgcctggaacaggaagaggatcagcaactgcgtggccgactacagcgtgctgtacaacagcgccagcttcagcaccttcaagtgctacggcgtgagccccaccaagctgaacgacctgtgcttcaccaacgtgtacgccgacagcttcgtgatcaggggcgacgaggtgaggcagatcgcccccggccagaccggcaagatcgccgactacaactacaagctgcccgacgacttcaccggctgcgtgatcgcctggaacagcaacaacctggacagcaaggtgggcggcaactacaactacctgtacaggctgttcaggaagagcaacctgaagcccttcgagagggacatcagcaccgagatctaccaggccggcagcaccccctgcaacggcgtggagggcttcaactgctacttccccctgcagagctacggcttccagcccaccaacggcgtgggctaccagccctacagggtggtggtgctgagcttcgagctgctgcacgcccccgccaccgtgtgcggccccaagaagagcaccaacctggtgaagaacaagtgcgtgaacttcaacttcaacggcctgaccggcaccggcgtgctgaccgagagcaacaagaagttcctgcccttccagcagttcggcagggacatcgccgacaccaccgacgccgtgagggacccccagaccctggagatcctggacatcaccccctgcagcttcggcggcgtgagcgtgatcacccccggcaccaacaccagcaaccaggtggccgtgctgtaccaggacgtgaactgcaccgaggtgcccgtggccatccacgccgaccagctgacccccacctggagggtgtacagcaccggcagcaacgtgttccagaccagggccggctgcctgatcggcgccgagcacgtgaacaacagctacgagtgcgacatccccatcggcgccggcatctgcgccagctaccagacccagaccaacagccccaggagggccaggagcgtggccagccagagcatcatcgcctacaccatgagcctgggcgccgagaacagcgtggcctacagcaacaacagcatcgccatccccaccaacttcaccatcagcgtgaccaccgagatcctgcccgtgagcatgaccaagaccagcgtggactgcaccatgtacatctgcggcgacagcaccgagtgcagcaacctgctgctgcagtacggcagcttctgcacccagctgaacagggccctgaccggcatcgccgtggagcaggacaagaacacccaggaggtgttcgcccaggtgaagcagatctacaagaccccccccatcaaggacttcggcggcttcaacttcagccagatcctgcccgaccccagcaagcccagcaagaggagcttcatcgaggacctgctgttcaacaaggtgaccctggccgacgccggcttcatcaagcagtacggcgactgcctgggcgacatcgccgccagggacctgatctgcgcccagaagttcaacggcctgaccgtgctgccccccctgctgaccgacgagatgatcgcccagtacaccagcgccctgctggccggcaccatcaccagcggctggaccttcggcgccggcgccgccctgcagatccccttcgccatgcagatggcctacaggttcaacggcatcggcgtgacccagaacgtgctgtacgagaaccagaagctgatcgccaaccagttcaacagcgccatcggcaagatccaggacagcctgagcagcaccgccagcgccctgggcaagctgcaggacgtggtgaaccagaacgcccaggccctgaacaccctggtgaagcagctgagcagcaacttcggcgccatcagcagcgtgctgaacgacatcctgagcaggctggacccccccgaggccgaggtgcagatcgacaggctgatcaccggcaggctgcagagcctgcagacctacgtgacccagcagctgatcagggccgccgagatcagggccagcgccaacctggccgccaccaagatgagcgagtgcgtgctgggccagagcaagagggtggacttctgcggcaagggctaccacctgatgagcttcccccagagcgccccccacggcgtggtgttcctgcacgtgacctacgtgcccgcccaggagaagaacttcaccaccgcccccgccatctgccacgacggcaaggcccacttccccagggagggcgtgttcgtgagcaacggcacccactggttcgtgacccagaggaacttctacgagccccagatcatcaccaccgacaacaccttcgtgagcggcaactgcgacgtggtgatcggcatcgtgaacaacaccgtgtacgaccccctgcagcccgagctggacagcttcaaggaggagctggacaagtacttcaagaaccacaccagccccgacgtggacctgggcgacatcagcggcatcaacgccagcgtggtgaacatccagaaggagatcgacaggctgaacgaggtggccaagaacctgaacgagagcctgatcgacctgcaggagctgggcaagtacgagcagtacatcaagtggccctggtacatctggctgggcttcatcgccggcctgatcgccatcgtgatggtgaccatcatgctgtgctgcatgaccagctgctgcagctgcctgaagggctgctgcagctgcggcagctgctgcaagttcgacgaggacgacagcgagcccgtgctgaagggcgtgaagctgcactacaccggaagcggagccacgaacttctctctgttaaagcaagcaggagatgttgaagaaaaccccgggcctagcagccaggcctggcagcccggcgtggccatgcccaacctgtacaagatgcagaggatgctgctggagaagtgcgacctgcagaactacggcgacagcgccaccctgcccaagggcatcatgatgaacgtggccaagtacacccagctgtgccagtacctgaacaccctgaccctggccgtgccctacaacatgagggtgatccacttcggcgccggcagcgacaagggcgtggcccccggcaccgccgtgctgaggcagtggctgcccaccggcaccctgctggtggacagcgacctgaacgacttcgtgagcgacgccgacagcaccctgatcggcgactgcgccaccgtgcacaccgccaacaagtgggacctgatcatcagcgacatgtacgaccccaagaccaagaacgtgaccaaggagaacgacagcaaggagggcttcttcacctacatctgcggcttcatccagcagaagctggccctgggcggcagcgtggccatcaagatcaccgagcacagctggaacgccgacctgtacaagctgatgggccacttcgcctggtggaccgccttcgtgaccaacgtgaacgccagcagcagcgaggccttcctgatcggctgcaactacctgggcaagcccagggagcagatcgacggctacgtgatgcacgccaactacatcttctggaggaacaccaaccccatccagctgagcagctacagcctgttcgacatgagcaagttccccctgaagctgaggggcaccgccgtgatgagcctgaaggagggccagatcaacgacatgatcctgagcctgctgagcaagggcaggctgatcatcagggagaacaacagggtggtgatcagcagcgacgtgctggtgaacaactgatgactcgagctggtactgcatgcacgcaatgctagctgcccctttcccgtcctgggtaccccgagtctcccccgacctcgggtcccaggtatgctcccacctccacctgccccactcaccacctctgctagttccagacacctcccaagcacgcagcaatgcagctcaaaacgcttagcctagccacacccccacgggaaacagcagtgattaacctttagcaataaacgaaagtttaactaagctatactaaccccagggttggtcaatttcgtgccagccacaccctggagctagcaaaaaaaa

SEQ ID NO: 304 - DNA, 5731 bp, synthetic construct
  source 1..5731: mol_type = other DNA; note = Synthesized Vaccine Candidate 19
tagttattaatagtaatcaattacggggtcattagttcatagcccatatatggagttccgcgttacataacttacggtaaatggcccgcctggctgaccgcccaacgacccccgcccattgacgtcaataatgacgtatgttcccatagtaacgccaatagggactttccattgacgtcaatgggtggagtatttacggtaaactgcccacttggcagtacatcaagtgtatcatatgccaagtacgccccctattgacgtcaatgacggtaaatggcccgcctggcattatgcccagtacatgaccttatgggactttcctacttggcagtacatctacgtattagtcatcgctattaccatggtgatgcggttttggcagtacatcaatgggcgtggatagcggtttgactcacggggatttccaagtctccaccccattgacgtcaatgggagtttgttttggcaccaaaatcaacgggactttccaaaatgtcgtaacaactccgccccattgacgcaaatgggcggtaggcgtgtacggtgggaggtctatataagcagagctggtttagtgaaccgtcagatcgagaataaactagtattcttctggtccccacagactcagagagaacccgccaccatgttcgtgttcctggtgctgctgcccctggtgagcagccagtgcgtgaacctgaccaccaggacccagctgccccccgcctacaccaacagcttcaccaggggcgtgtactaccccgacaaggtgttcaggagcagcgtgctgcacagcacccaggacctgttcctgcccttcttcagcaacgtgacctggttccacgccatccacgtgagcggcaccaacggcaccaagaggttcgacaaccccgtgctgcccttcaacgacggcgtgtacttcgccagcaccgagaagagcaacatcatcaggggctggatcttcggcaccaccctggacagcaagacccagagcctgctgatcgtgaacaacgccaccaacgtggtgatcaaggtgtgcgagttccagttctgcaacgaccccttcctgggcgtgtactaccacaagaacaacaagagctggatggagagcgagttcagggtgtacagcagcgccaacaactgcaccttcgagtacgtgagccagcccttcctgatggacctggagggcaagcagggcaacttcaagaacctgagggagttcgtgttcaagaacatcgacggctacttcaagatctacagcaagcacacccccatcaacctggtgagggacctgccccagggcttcagcgccctggagcccctggtggacctgcccatcggcatcaacatcaccaggttccagaccctgctggccctgcacaggagctacctgacccccggcgacagcagcagcggctggaccgccggcgccgccgcctactacgtgggctacctgcagcccaggaccttcctgctgaagtacaacgagaacggcaccatcaccgacgccgtggactgcgccctggaccccctgagcgagaccaagtgcaccctgaagagcttcaccgtggagaagggcatctaccagaccagcaacttcagggtgcagcccaccgagagcatcgtgaggttccccaacatcaccaacctgtgccccttcggcgaggtgttcaacgccaccaggttcgccagcgtgtacgcctggaacaggaagaggatcagcaactgcgtggccgactacagcgtgctgtacaacagcgccagcttcagcaccttcaagtgctacggcgtgagccccaccaagctgaacgacctgtgcttcaccaacgtgtacgccgacagcttcgtgatcaggggcgacgaggtgaggcagatcgcccccggccagaccggcaagatcgccgactacaactacaagctgcccgacgacttcaccggctgcgtgatcgcctggaacagcaacaacctggacagcaaggtgggcggcaactacaactacctgtacaggctgttcaggaagagcaacctgaagcccttcgagagggacatcagcaccgagatctaccaggccggcagcaccccctgcaacggcgtggagggcttcaactgctacttccccctgcagagctacggcttccagcccaccaacggcgtgggctaccagccctacagggtggtggtgctgagcttcgagctgctgcacgcccccgccaccgtgtgcggccccaagaagagcaccaacctggtgaagaacaagtgcgtgaacttcaacttcaacggcctgaccggcaccggcgtgctgaccgagagcaacaagaagttcctgcccttccagcagttcggcagggacatcgccgacaccaccgacgccgtgagggacccccagaccctggagatcctggacatcaccccctgcagcttcggcggcgtgagcgtgatcacccccggcaccaacaccagcaaccaggtggccgtgctgtaccaggacgtgaactgcaccgaggtgcccgtggccatccacgccgaccagctgacccccacctggagggtgtacagcaccggcagcaacgtgttccagaccagggccggctgcctgatcggcgccgagcacgtgaacaacagctacgagtgcgacatccccatcggcgccggcatctgcgccagctaccagacccagaccaacagccccggcagcgccagcagcgtggccagccagagcatcatcgcctacaccatgagcctgggcgccgagaacagcgtggcctacagcaacaacagcatcgccatccccaccaacttcaccatcagcgtgaccaccgagatcctgcccgtgagcatgaccaagaccagcgtggactgcaccatgtacatctgcggcgacagcaccgagtgcagcaacctgctgctgcagtacggcagcttctgcacccagctgaacagggccctgaccggcatcgccgtggagcaggacaagaacacccaggaggtgttcgcccaggtgaagcagatctacaagaccccccccatcaaggacttcggcggcttcaacttcagccagatcctgcccgaccccagcaagcccagcaagaggagccccatcgaggacctgctgttcaacaaggtgaccctggccgacgccggcttcatcaagcagtacggcgactgcctgggcgacatcgccgccagggacctgatctgcgcccagaagttcaacggcctgaccgtgctgccccccctgctgaccgacgagatgatcgcccagtacaccagcgccctgctggccggcaccatcaccagcggctggaccttcggcgccggccccgccctgcagatccccttccccatgcagatggcctacaggttcaacggcatcggcgtgacccagaacgtgctgtacgagaaccagaagctgatcgccaaccagttcaacagcgccatcggcaagatccaggacagcctgagcagcacccccagcgccctgggcaagctgcaggacgtggtgaaccagaacgcccaggccctgaacaccctggtgaagcagctgagcagcaacttcggcgccatcagcagcgtgctgaacgacatcctgagcaggctggacccccccgaggccgaggtgcagatcgacaggctgatcaccggcaggctgcagagcctgcagacctacgtgacccagcagctgatcagggccgccgagatcagggccagcgccaacctggccgccaccaagatgagcgagtgcgtgctgggccagagcaagagggtggacttctgcggcaagggctaccacctgatgagcttcccccagagcgccccccacggcgtggtgttcctgcacgtgacctacgtgcccgcccaggagaagaacttcaccaccgcccccgccatctgccacgacggcaaggcccacttccccagggagggcgtgttcgtgagcaacggcacccactggttcgtgacccagaggaacttctacgagccccagatcatcaccaccgacaacaccttcgtgagcggcaactgcgacgtggtgatcggcatcgtgaacaacaccgtgtacgaccccctgcagcccgagctggacagcttcaaggaggagctggacaagtacttcaagaaccacaccagccccgacgtggacctgggcgacatcagcggcatcaacgccagcgtggtgaacatccagaaggagatcgacaggctgaacgaggtggccaagaacctgaacgagagcctgatcgacctgcaggagctgggcaagtacgagcagtacatcaagtggccctggtacatctggctgggcttcatcgccggcctgatcgccatcgtgatggtgaccatcatgctgtgctgcatgaccagctgctgcagctgcctgaagggctgctgcagctgcggcagctgctgcaagttcgacgaggacgacagcgagcccgtgctgaagggcgtgaagctgcactacaccggaagcggagccacgaacttctctctgttaaagcaagcaggagatgttgaagaaaaccccgggcctagcagccaggcctggcagcccggcgtggccatgcccaacctgtacaagatgcagaggatgctgctggagaagtgcgacctgcagaactacggcgacagcgccaccctgcccaagggcatcatgatgaacgtggccaagtacacccagctgtgccagtacctgaacaccctgaccctggccgtgccctacaacatgagggtgatccacttcggcgccggcagcgacaagggcgtggcccccggcaccgccgtgctgaggcagtggctgcccaccggcaccctgctggtggacagcgacctgaacgacttcgtgagcgacgccgacagcaccctgatcggcgactgcgccaccgtgcacaccgccaacaagtgggacctgatcatcagcgacatgtacgaccccaagaccaagaacgtgaccaaggagaacgacagcaaggagggcttcttcacctacatctgcggcttcatccagcagaagctggccctgggcggcagcgtggccatcaagatcaccgagcacagctggaacgccgacctgtacaagctgatgggccacttcgcctggtggaccgccttcgtgaccaacgtgaacgccagcagcagcgaggccttcctgatcggctgcaactacctgggcaagcccagggagcagatcgacggctacgtgatgcacgccaactacatcttctggaggaacaccaaccccatccagctgagcagctacagcctgttcgacatgagcaagttccccctgaagctgaggggcaccgccgtgatgagcctgaaggagggccagatcaacgacatgatcctgagcctgctgagcaagggcaggctgatcatcagggagaacaacagggtggtgatcagcagcgacgtgctggtgaacaactgatgactcgagctggtactgcatgcacgcaatgctagctgcccctttcccgtcctgggtaccccgagtctcccccgacctcgggtcccaggtatgctcccacctccacctgccccactcaccacctctgctagttccagacacctcccaagcacgcagcaatgcagctcaaaacgcttagcctagccacacccccacgggaaacagcagtgattaacctttagcaataaacgaaagtttaactaagctatactaaccccagggttggtcaatttcgtgccagccacaccctggagctagcaaaaaaaa

SEQ ID NO: 305 - DNA, 5662 bp, synthetic construct
  source 1..5662: mol_type = other DNA; note = Sythesized Vaccine Candidate 20
tagttattaatagtaatcaattacggggtcattagttcatagcccatatatggagttccgcgttacataacttacggtaaatggcccgcctggctgaccgcccaacgacccccgcccattgacgtcaataatgacgtatgttcccatagtaacgccaatagggactttccattgacgtcaatgggtggagtatttacggtaaactgcccacttggcagtacatcaagtgtatcatatgccaagtacgccccctattgacgtcaatgacggtaaatggcccgcctggcattatgcccagtacatgaccttatgggactttcctacttggcagtacatctacgtattagtcatcgctattaccatggtgatgcggttttggcagtacatcaatgggcgtggatagcggtttgactcacggggatttccaagtctccaccccattgacgtcaatgggagtttgttttggcaccaaaatcaacgggactttccaaaatgtcgtaacaactccgccccattgacgcaaatgggcggtaggcgtgtacggtgggaggtctatataagcagagctggtttagtgaaccgtcagatcgagaataaactagtattcttctggtccccacagactcagagagaacccgccaccatgttcgtgttcctggtgctgctgcccctggtgagcagccagtgcgtgaacctgaccaccaggacccagctgccccccgcctacaccaacagcttcaccaggggcgtgtactaccccgacaaggtgttcaggagcagcgtgctgcacagcacccaggacctgttcctgcccttcttcagcaacgtgacctggttccacgccatccacgtgagcggcaccaacggcaccaagaggttcgacaaccccgtgctgcccttcaacgacggcgtgtacttcgccagcaccgagaagagcaacatcatcaggggctggatcttcggcaccaccctggacagcaagacccagagcctgctgatcgtgaacaacgccaccaacgtggtgatcaaggtgtgcgagttccagttctgcaacgaccccttcctgggcgtgtactaccacaagaacaacaagagctggatggagagcgagttcagggtgtacagcagcgccaacaactgcaccttcgagtacgtgagccagcccttcctgatggacctggagggcaagcagggcaacttcaagaacctgagggagttcgtgttcaagaacatcgacggctacttcaagatctacagcaagcacacccccatcaacctggtgagggacctgccccagggcttcagcgccctggagcccctggtggacctgcccatcggcatcaacatcaccaggttccagaccctgctggccctgcacaggagctacctgacccccggcgacagcagcagcggctggaccgccggcgccgccgcctactacgtgggctacctgcagcccaggaccttcctgctgaagtacaacgagaacggcaccatcaccgacgccgtggactgcgccctggaccccctgagcgagaccaagtgcaccctgaagagcttcaccgtggagaagggcatctaccagaccagcaacttcagggtgcagcccaccgagagcatcgtgaggttccccaacatcaccaacctgtgccccttcggcgaggtgttcaacgccaccaggttcgccagcgtgtacgcctggaacaggaagaggatcagcaactgcgtggccgactacagcgtgctgtacaacagcgccagcttcagcaccttcaagtgctacggcgtgagccccaccaagctgaacgacctgtgcttcaccaacgtgtacgccgacagcttcgtgatcaggggcgacgaggtgaggcagatcgcccccggccagaccggcaagatcgccgactacaactacaagctgcccgacgacttcaccggctgcgtgatcgcctggaacagcaacaacctggacagcaaggtgggcggcaactacaactacctgtacaggctgttcaggaagagcaacctgaagcccttcgagagggacatcagcaccgagatctaccaggccggcagcaccccctgcaacggcgtggagggcttcaactgctacttccccctgcagagctacggcttccagcccaccaacggcgtgggctaccagccctacagggtggtggtgctgagcttcgagctgctgcacgcccccgccaccgtgtgcggccccaagaagagcaccaacctggtgaagaacaagtgcgtgaacttcaacttcaacggcctgaccggcaccggcgtgctgaccgagagcaacaagaagttcctgcccttccagcagttcggcagggacatcgccgacaccaccgacgccgtgagggacccccagaccctggagatcctggacatcaccccctgcagcttcggcggcgtgagcgtgatcacccccggcaccaacaccagcaaccaggtggccgtgctgtaccaggacgtgaactgcaccgaggtgcccgtggccatccacgccgaccagctgacccccacctggagggtgtacagcaccggcagcaacgtgttccagaccagggccggctgcctgatcggcgccgagcacgtgaacaacagctacgagtgcgacatccccatcggcgccggcatctgcgccagctaccagacccagaccaacagccccaggagggccaggagcgtggccagccagagcatcatcgcctacaccatgagcctgggcgccgagaacagcgtggcctacagcaacaacagcatcgccatccccaccaacttcaccatcagcgtgaccaccgagatcctgcccgtgagcatgaccaagaccagcgtggactgcaccatgtacatctgcggcgacagcaccgagtgcagcaacctgctgctgcagtacggcagcttctgcacccagctgaacagggccctgaccggcatcgccgtggagcaggacaagaacacccaggaggtgttcgcccaggtgaagcagatctacaagaccccccccatcaaggacttcggcggcttcaacttcagccagatcctgcccgaccccagcaagcccagcaagaggagcttcatcgaggacctgctgttcaacaaggtgaccctggccgacgccggcttcatcaagcagtacggcgactgcctgggcgacatcgccgccagggacctgatctgcgcccagaagttcaacggcctgaccgtgctgccccccctgctgaccgacgagatgatcgcccagtacaccagcgccctgctggccggcaccatcaccagcggctggaccttcggcgccggcgccgccctgcagatccccttcgccatgcagatggcctacaggttcaacggcatcggcgtgacccagaacgtgctgtacgagaaccagaagctgatcgccaaccagttcaacagcgccatcggcaagatccaggacagcctgagcagcaccgccagcgccctgggcaagctgcaggacgtggtgaaccagaacgcccaggccctgaacaccctggtgaagcagctgagcagcaacttcggcgccatcagcagcgtgctgaacgacatcctgagcaggctggacccccccgaggccgaggtgcagatcgacaggctgatcaccggcaggctgcagagcctgcagacctacgtgacccagcagctgatcagggccgccgagatcagggccagcgccaacctggccgccaccaagatgagcgagtgcgtgctgggccagagcaagagggtggacttctgcggcaagggctaccacctgatgagcttcccccagagcgccccccacggcgtggtgttcctgcacgtgacctacgtgcccgcccaggagaagaacttcaccaccgcccccgccatctgccacgacggcaaggcccacttccccagggagggcgtgttcgtgagcaacggcacccactggttcgtgacccagaggaacttctacgagccccagatcatcaccaccgacaacaccttcgtgagcggcaactgcgacgtggtgatcggcatcgtgaacaacaccgtgtacgaccccctgcagcccgagctggacagcttcaaggaggagctggacaagtacttcaagaaccacaccagccccgacgtggacctgggcgacatcagcggcatcaacgccagcgtggtgaacatccagaaggagatcgacaggctgaacgaggtggccaagaacctgaacgagagcctgatcgacctgcaggagctgggcaagtacgagcagtacatcaagtggccctggtacatctggctgggcttcatcgccggcctgatcgccatcgtgatggtgaccatcatgctgtgctgcatgaccagctgctgcagctgcctgaagggctgctgcagctgcggcagctgctgcaagttcgacgaggacgacagcgagcccgtgctgaagggcgtgaagctgcactacaccggaagcggagccacgaacttctctctgttaaagcaagcaggagatgttgaagaaaaccccgggcctatggacctgttcatgaggatcttcaccatcggcaccgtgaccctgaagcagggcgagatcaaggacgccacccccagcgacttcgtgagggccaccgccaccatccccatccaggccagcctgcccttcggctggctgatcgtgggcgtggccctgctggccgtgttccagagcgccagcaagatcatcaccctgaagaagaggtggcagctggccctgagcaagggcgtgcacttcgtgtgcaacctgctgctgctgttcgtgaccgtgtacagccacctgctgctggtggccgccggcctggaggcccccttcctgtacctgtacgccctggtgtacttcctgcagagcatcaacttcgtgaggatcatcatgaggctgtggctgtgctggaagtgcaggagcaagaaccccctgctgtacgacgccaactacttcctgtgctggcacaccaactgctacgactactgcatcccctacaacagcgtgaccagcagcatcgtgatcaccagcggcgacggcaccaccagccccatcagcgagcacgactaccagatcggcggctacaccgagaagtgggagagcggcgtgaaggactgcgtggtgctgcacagctacttcaccagcgactactaccagctgtacagcacccagctgagcaccgacaccggcgtggagcacgtgaccttcttcatctacaacaagatcgtggacgagcccgaggagcacgtgcagatccacaccatcgacggcagcagcggcgtggtgaaccccgtgatggagcccatctacgacgagcccaccaccaccaccagcgtgcccctgtgatgactcgagctggtactgcatgcacgcaatgctagctgcccctttcccgtcctgggtaccccgagtctcccccgacctcgggtcccaggtatgctcccacctccacctgccccactcaccacctctgctagttccagacacctcccaagcacgcagcaatgcagctcaaaacgcttagcctagccacacccccacgggaaacagcagtgattaacctttagcaataaacgaaagtttaactaagctatactaaccccagggttggtcaatttcgtgccagccacaccctggagctagcaaaaaaaa

SEQ ID NO: 306 - DNA, 5662 bp, synthetic construct
  source 1..5662: mol_type = other DNA; note = Synthesized Vaccine Candidate 21
tagttattaatagtaatcaattacggggtcattagttcatagcccatatatggagttccgcgttacataacttacggtaaatggcccgcctggctgaccgcccaacgacccccgcccattgacgtcaataatgacgtatgttcccatagtaacgccaatagggactttccattgacgtcaatgggtggagtatttacggtaaactgcccacttggcagtacatcaagtgtatcatatgccaagtacgccccctattgacgtcaatgacggtaaatggcccgcctggcattatgcccagtacatgaccttatgggactttcctacttggcagtacatctacgtattagtcatcgctattaccatggtgatgcggttttggcagtacatcaatgggcgtggatagcggtttgactcacggggatttccaagtctccaccccattgacgtcaatgggagtttgttttggcaccaaaatcaacgggactttccaaaatgtcgtaacaactccgccccattgacgcaaatgggcggtaggcgtgtacggtgggaggtctatataagcagagctggtttagtgaaccgtcagatcgagaataaactagtattcttctggtccccacagactcagagagaacccgccaccatgttcgtgttcctggtgctgctgcccctggtgagcagccagtgcgtgaacctgaccaccaggacccagctgccccccgcctacaccaacagcttcaccaggggcgtgtactaccccgacaaggtgttcaggagcagcgtgctgcacagcacccaggacctgttcctgcccttcttcagcaacgtgacctggttccacgccatccacgtgagcggcaccaacggcaccaagaggttcgacaaccccgtgctgcccttcaacgacggcgtgtacttcgccagcaccgagaagagcaacatcatcaggggctggatcttcggcaccaccctggacagcaagacccagagcctgctgatcgtgaacaacgccaccaacgtggtgatcaaggtgtgcgagttccagttctgcaacgaccccttcctgggcgtgtactaccacaagaacaacaagagctggatggagagcgagttcagggtgtacagcagcgccaacaactgcaccttcgagtacgtgagccagcccttcctgatggacctggagggcaagcagggcaacttcaagaacctgagggagttcgtgttcaagaacatcgacggctacttcaagatctacagcaagcacacccccatcaacctggtgagggacctgccccagggcttcagcgccctggagcccctggtggacctgcccatcggcatcaacatcaccaggttccagaccctgctggccctgcacaggagctacctgacccccggcgacagcagcagcggctggaccgccggcgccgccgcctactacgtgggctacctgcagcccaggaccttcctgctgaagtacaacgagaacggcaccatcaccgacgccgtggactgcgccctggaccccctgagcgagaccaagtgcaccctgaagagcttcaccgtggagaagggcatctaccagaccagcaacttcagggtgcagcccaccgagagcatcgtgaggttccccaacatcaccaacctgtgccccttcggcgaggtgttcaacgccaccaggttcgccagcgtgtacgcctggaacaggaagaggatcagcaactgcgtggccgactacagcgtgctgtacaacagcgccagcttcagcaccttcaagtgctacggcgtgagccccaccaagctgaacgacctgtgcttcaccaacgtgtacgccgacagcttcgtgatcaggggcgacgaggtgaggcagatcgcccccggccagaccggcaagatcgccgactacaactacaagctgcccgacgacttcaccggctgcgtgatcgcctggaacagcaacaacctggacagcaaggtgggcggcaactacaactacctgtacaggctgttcaggaagagcaacctgaagcccttcgagagggacatcagcaccgagatctaccaggccggcagcaccccctgcaacggcgtggagggcttcaactgctacttccccctgcagagctacggcttccagcccaccaacggcgtgggctaccagccctacagggtggtggtgctgagcttcgagctgctgcacgcccccgccaccgtgtgcggccccaagaagagcaccaacctggtgaagaacaagtgcgtgaacttcaacttcaacggcctgaccggcaccggcgtgctgaccgagagcaacaagaagttcctgcccttccagcagttcggcagggacatcgccgacaccaccgacgccgtgagggacccccagaccctggagatcctggacatcaccccctgcagcttcggcggcgtgagcgtgatcacccccggcaccaacaccagcaaccaggtggccgtgctgtaccaggacgtgaactgcaccgaggtgcccgtggccatccacgccgaccagctgacccccacctggagggtgtacagcaccggcagcaacgtgttccagaccagggccggctgcctgatcggcgccgagcacgtgaacaacagctacgagtgcgacatccccatcggcgccggcatctgcgccagctaccagacccagaccaacagccccggcagcgccagcagcgtggccagccagagcatcatcgcctacaccatgagcctgggcgccgagaacagcgtggcctacagcaacaacagcatcgccatccccaccaacttcaccatcagcgtgaccaccgagatcctgcccgtgagcatgaccaagaccagcgtggactgcaccatgtacatctgcggcgacagcaccgagtgcagcaacctgctgctgcagtacggcagcttctgcacccagctgaacagggccctgaccggcatcgccgtggagcaggacaagaacacccaggaggtgttcgcccaggtgaagcagatctacaagaccccccccatcaaggacttcggcggcttcaacttcagccagatcctgcccgaccccagcaagcccagcaagaggagccccatcgaggacctgctgttcaacaaggtgaccctggccgacgccggcttcatcaagcagtacggcgactgcctgggcgacatcgccgccagggacctgatctgcgcccagaagttcaacggcctgaccgtgctgccccccctgctgaccgacgagatgatcgcccagtacaccagcgccctgctggccggcaccatcaccagcggctggaccttcggcgccggccccgccctgcagatccccttccccatgcagatggcctacaggttcaacggcatcggcgtgacccagaacgtgctgtacgagaaccagaagctgatcgccaaccagttcaacagcgccatcggcaagatccaggacagcctgagcagcacccccagcgccctgggcaagctgcaggacgtggtgaaccagaacgcccaggccctgaacaccctggtgaagcagctgagcagcaacttcggcgccatcagcagcgtgctgaacgacatcctgagcaggctggacccccccgaggccgaggtgcagatcgacaggctgatcaccggcaggctgcagagcctgcagacctacgtgacccagcagctgatcagggccgccgagatcagggccagcgccaacctggccgccaccaagatgagcgagtgcgtgctgggccagagcaagagggtggacttctgcggcaagggctaccacctgatgagcttcccccagagcgccccccacggcgtggtgttcctgcacgtgacctacgtgcccgcccaggagaagaacttcaccaccgcccccgccatctgccacgacggcaaggcccacttccccagggagggcgtgttcgtgagcaacggcacccactggttcgtgacccagaggaacttctacgagccccagatcatcaccaccgacaacaccttcgtgagcggcaactgcgacgtggtgatcggcatcgtgaacaacaccgtgtacgaccccctgcagcccgagctggacagcttcaaggaggagctggacaagtacttcaagaaccacaccagccccgacgtggacctgggcgacatcagcggcatcaacgccagcgtggtgaacatccagaaggagatcgacaggctgaacgaggtggccaagaacctgaacgagagcctgatcgacctgcaggagctgggcaagtacgagcagtacatcaagtggccctggtacatctggctgggcttcatcgccggcctgatcgccatcgtgatggtgaccatcatgctgtgctgcatgaccagctgctgcagctgcctgaagggctgctgcagctgcggcagctgctgcaagttcgacgaggacgacagcgagcccgtgctgaagggcgtgaagctgcactacaccggaagcggagccacgaacttctctctgttaaagcaagcaggagatgttgaagaaaaccccgggcctatggacctgttcatgaggatcttcaccatcggcaccgtgaccctgaagcagggcgagatcaaggacgccacccccagcgacttcgtgagggccaccgccaccatccccatccaggccagcctgcccttcggctggctgatcgtgggcgtggccctgctggccgtgttccagagcgccagcaagatcatcaccctgaagaagaggtggcagctggccctgagcaagggcgtgcacttcgtgtgcaacctgctgctgctgttcgtgaccgtgtacagccacctgctgctggtggccgccggcctggaggcccccttcctgtacctgtacgccctggtgtacttcctgcagagcatcaacttcgtgaggatcatcatgaggctgtggctgtgctggaagtgcaggagcaagaaccccctgctgtacgacgccaactacttcctgtgctggcacaccaactgctacgactactgcatcccctacaacagcgtgaccagcagcatcgtgatcaccagcggcgacggcaccaccagccccatcagcgagcacgactaccagatcggcggctacaccgagaagtgggagagcggcgtgaaggactgcgtggtgctgcacagctacttcaccagcgactactaccagctgtacagcacccagctgagcaccgacaccggcgtggagcacgtgaccttcttcatctacaacaagatcgtggacgagcccgaggagcacgtgcagatccacaccatcgacggcagcagcggcgtggtgaaccccgtgatggagcccatctacgacgagcccaccaccaccaccagcgtgcccctgtgatgactcgagctggtactgcatgcacgcaatgctagctgcccctttcccgtcctgggtaccccgagtctcccccgacctcgggtcccaggtatgctcccacctccacctgccccactcaccacctctgctagttccagacacctcccaagcacgcagcaatgcagctcaaaacgcttagcctagccacacccccacgggaaacagcagtgattaacctttagcaataaacgaaagtttaactaagctatactaaccccagggttggtcaatttcgtgccagccacaccctggagctagcaaaaaaaa

SEQ ID NO: 307 - RNA, 6408 nt, synthetic construct
  source 1..6408: mol_type = other RNA; note = Synthesized Vaccine Candidate 22
atgttcgtgttcctggtgctgctgcccctggtgagcagccagtgcgtgaacctgaccaccaggacccagctgccccccgcctacaccaacagcttcaccaggggcgtgtactaccccgacaaggtgttcaggagcagcgtgctgcacagcacccaggacctgttcctgcccttcttcagcaacgtgacctggttccacgccatccacgtgagcggcaccaacggcaccaagaggttcgacaaccccgtgctgcccttcaacgacggcgtgtacttcgccagcaccgagaagagcaacatcatcaggggctggatcttcggcaccaccctggacagcaagacccagagcctgctgatcgtgaacaacgccaccaacgtggtgatcaaggtgtgcgagttccagttctgcaacgaccccttcctgggcgtgtactaccacaagaacaacaagagctggatggagagcgagttcagggtgtacagcagcgccaacaactgcaccttcgagtacgtgagccagcccttcctgatggacctggagggcaagcagggcaacttcaagaacctgagggagttcgtgttcaagaacatcgacggctacttcaagatctacagcaagcacacccccatcaacctggtgagggacctgccccagggcttcagcgccctggagcccctggtggacctgcccatcggcatcaacatcaccaggttccagaccctgctggccctgcacaggagctacctgacccccggcgacagcagcagcggctggaccgccggcgccgccgcctactacgtgggctacctgcagcccaggaccttcctgctgaagtacaacgagaacggcaccatcaccgacgccgtggactgcgccctggaccccctgagcgagaccaagtgcaccctgaagagcttcaccgtggagaagggcatctaccagaccagcaacttcagggtgcagcccaccgagagcatcgtgaggttccccaacatcaccaacctgtgccccttcggcgaggtgttcaacgccaccaggttcgccagcgtgtacgcctggaacaggaagaggatcagcaactgcgtggccgactacagcgtgctgtacaacagcgccagcttcagcaccttcaagtgctacggcgtgagccccaccaagctgaacgacctgtgcttcaccaacgtgtacgccgacagcttcgtgatcaggggcgacgaggtgaggcagatcgcccccggccagaccggcaagatcgccgactacaactacaagctgcccgacgacttcaccggctgcgtgatcgcctggaacagcaacaacctggacagcaaggtgggcggcaactacaactacctgtacaggctgttcaggaagagcaacctgaagcccttcgagagggacatcagcaccgagatctaccaggccggcagcaccccctgcaacggcgtggagggcttcaactgctacttccccctgcagagctacggcttccagcccaccaacggcgtgggctaccagccctacagggtggtggtgctgagcttcgagctgctgcacgcccccgccaccgtgtgcggccccaagaagagcaccaacctggtgaagaacaagtgcgtgaacttcaacttcaacggcctgaccggcaccggcgtgctgaccgagagcaacaagaagttcctgcccttccagcagttcggcagggacatcgccgacaccaccgacgccgtgagggacccccagaccctggagatcctggacatcaccccctgcagcttcggcggcgtgagcgtgatcacccccggcaccaacaccagcaaccaggtggccgtgctgtaccaggacgtgaactgcaccgaggtgcccgtggccatccacgccgaccagctgacccccacctggagggtgtacagcaccggcagcaacgtgttccagaccagggccggctgcctgatcggcgccgagcacgtgaacaacagctacgagtgcgacatccccatcggcgccggcatctgcgccagctaccagacccagaccaacagccccaggagggccaggagcgtggccagccagagcatcatcgcctacaccatgagcctgggcgccgagaacagcgtggcctacagcaacaacagcatcgccatccccaccaacttcaccatcagcgtgaccaccgagatcctgcccgtgagcatgaccaagaccagcgtggactgcaccatgtacatctgcggcgacagcaccgagtgcagcaacctgctgctgcagtacggcagcttctgcacccagctgaacagggccctgaccggcatcgccgtggagcaggacaagaacacccaggaggtgttcgcccaggtgaagcagatctacaagaccccccccatcaaggacttcggcggcttcaacttcagccagatcctgcccgaccccagcaagcccagcaagaggagcttcatcgaggacctgctgttcaacaaggtgaccctggccgacgccggcttcatcaagcagtacggcgactgcctgggcgacatcgccgccagggacctgatctgcgcccagaagttcaacggcctgaccgtgctgccccccctgctgaccgacgagatgatcgcccagtacaccagcgccctgctggccggcaccatcaccagcggctggaccttcggcgccggcgccgccctgcagatccccttcgccatgcagatggcctacaggttcaacggcatcggcgtgacccagaacgtgctgtacgagaaccagaagctgatcgccaaccagttcaacagcgccatcggcaagatccaggacagcctgagcagcaccgccagcgccctgggcaagctgcaggacgtggtgaaccagaacgcccaggccctgaacaccctggtgaagcagctgagcagcaacttcggcgccatcagcagcgtgctgaacgacatcctgagcaggctggacccccccgaggccgaggtgcagatcgacaggctgatcaccggcaggctgcagagcctgcagacctacgtgacccagcagctgatcagggccgccgagatcagggccagcgccaacctggccgccaccaagatgagcgagtgcgtgctgggccagagcaagagggtggacttctgcggcaagggctaccacctgatgagcttcccccagagcgccccccacggcgtggtgttcctgcacgtgacctacgtgcccgcccaggagaagaacttcaccaccgcccccgccatctgccacgacggcaaggcccacttccccagggagggcgtgttcgtgagcaacggcacccactggttcgtgacccagaggaacttctacgagccccagatcatcaccaccgacaacaccttcgtgagcggcaactgcgacgtggtgatcggcatcgtgaacaacaccgtgtacgaccccctgcagcccgagctggacagcttcaaggaggagctggacaagtacttcaagaaccacaccagccccgacgtggacctgggcgacatcagcggcatcaacgccagcgtggtgaacatccagaaggagatcgacaggctgaacgaggtggccaagaacctgaacgagagcctgatcgacctgcaggagctgggcaagtacgagcagtacatcaagtggccctggtacatctggctgggcttcatcgccggcctgatcgccatcgtgatggtgaccatcatgctgtgctgcatgaccagctgctgcagctgcctgaagggctgctgcagctgcggcagctgctgcaagttcgacgaggacgacagcgagcccgtgctgaagggcgtgaagctgcactacaccggaagcggagccacgaacttctctctgttaaagcaagcaggagatgttgaagaaaaccccgggcctatggagagcctggtgcccggcttcaacgagaagacccacgtgcagctgagcctgcccgtgctgcaggtgagggacgtgctggtgaggggcttcggcgacagcgtggaggaggtgctgagcgaggccaggcagcacctgaaggacggcacctgcggcctggtggaggtggagaagggcgtgctgccccagctggagcagccctacgtgttcatcaagaggagcgacgccaggaccgccccccacggccacgtgatggtggagctggtggccgagctggagggcatccagtacggcaggagcggcgagaccctgggcgtgctggtgccccacgtgggcgagatccccgtggcctacaggaaggtgctgctgaggaagaacggcaacaagggcgccggcggccacagctacggcgccgacctgaagagcttcgacctgggcgacgagctgggcaccgacccctacgaggacttccaggagaactggaacaccaagcacagcagcggcgtgaccagggagctgatgagggagctgaacggcggcggaagcggagagggcaggggaagtcttctaacatgcggggacgtggaggaaaatcccggccccgcctacaccaggtacgtggacaacaacttctgcggccccgacggctaccccctggagtgcatcaaggacctgctggccagggccggcaaggccagctgcaccctgagcgagcagctggacttcatcgacaccaagaggggcgtgtactgctgcagggagcacgagcacgagatcgcctggtacaccgagaggagcgagaagagctacgagctgcagacccccttcgagatcaagctggccaagaagttcgacaccttcaacggcgagtgccccaacttcgtgttccccctgaacagcatcatcaagaccatccagcccagggtggagaagaagaagctggacggcttcatgggcaggatcaggagcgtgtaccccgtggccagccccaacgagtgcaaccagatgtgcctgagcaccctgatgaagtgcgaccactgcggcgagaccagctggcagaccggcgacttcgtgaaggccacctgcgagttctgcggcaccgagaacctgaccaaggagggcgccaccacctgcggctacctgccccagaacgccgtggtgaagatctactgccccgcctgccacaacagcgaggtgggccccgagcacagcctggccgagtaccacaacgagagcggcctgaagaccatcctgaggaagggcggcaggaccatcgccttcggcggctgcgtgttcagctacgtgggctgccacaacaagtgcgcctactgggtgcccagggccagcgccaacatcggctgcaaccacaccggcgtggtgggcgagggcagcgagggcctgaacgacaacctgctggagatcctgcagaaggagaaggtgaacatcaacatcgtgggcgacttcaagctgaacgaggagatcgccatcatcctggccagcttcagcgccagcaccagcgccttcgtggagaccgtgaagggcctggactacaaggccttcaagcagatcgtggagagctgcggcaacttcaaggtgaccaagggcaaggccaagaagggcgcctggaacatcggcgagcagaagagcatcctgagccccctgtacgccttcgccagcgaggccgccagggtggtgaggagcatcttcagcaggaccctggagaccgcccagaacagcgtgagggtgctgcagaaggccgccatcaccatcctggacggcatcagccagtacagcctgaggctgatcgacgccatgatgttcaccagcgacctggccaccaacaacctggtggtgatggcctacatcaccggcggcgtggtgcagctgaccagccagtggctgaccaacatcttcggcaccgtgtacgagaagctgaagcccgtgctggactggctggaggagaagttcaaggagggcgtggagttcctgagggacggctgggagatcgtgaagttcatcagcacctgcgcctgcgagatcgtgggcggccagatcgtgacctgcgccaaggagatcaaggagagcgtgcagaccttcttcaagctggtgaacaagttcctggccctgtgcgccgacagcatcatcatcggcggcgccaagctgaaggccctgaacctgggcgagaccttcgtgacccacagcaagggcctgtacaggaagtgcgtgaagagcagggaggagaccggcctgctgatgcccctgaaggcccccaaggagatcatcttcctggagggcgagaccctgcccaccgaggtgctgaccgaggaggtggtgctgaagaccggcgacctgcagcccctggagcagcccaccagcgaggccgtggaggcccccctggtgggcacccccgtgtgcatcaacggcctgatgctgctggagatcaaggacaccgagaagtactgcgccctggcccccaacatgatggtgaccaacaacaccttcaccctgaagggcggctgatga

SEQ ID NO: 308 - DNA, 6408 bp, synthetic construct
  source 1..6408: mol_type = other DNA; note = Synthesized Vaccine Candiate 23
atgttcgtgttcctggtgctgctgcccctggtgagcagccagtgcgtgaacctgaccaccaggacccagctgccccccgcctacaccaacagcttcaccaggggcgtgtactaccccgacaaggtgttcaggagcagcgtgctgcacagcacccaggacctgttcctgcccttcttcagcaacgtgacctggttccacgccatccacgtgagcggcaccaacggcaccaagaggttcgacaaccccgtgctgcccttcaacgacggcgtgtacttcgccagcaccgagaagagcaacatcatcaggggctggatcttcggcaccaccctggacagcaagacccagagcctgctgatcgtgaacaacgccaccaacgtggtgatcaaggtgtgcgagttccagttctgcaacgaccccttcctgggcgtgtactaccacaagaacaacaagagctggatggagagcgagttcagggtgtacagcagcgccaacaactgcaccttcgagtacgtgagccagcccttcctgatggacctggagggcaagcagggcaacttcaagaacctgagggagttcgtgttcaagaacatcgacggctacttcaagatctacagcaagcacacccccatcaacctggtgagggacctgccccagggcttcagcgccctggagcccctggtggacctgcccatcggcatcaacatcaccaggttccagaccctgctggccctgcacaggagctacctgacccccggcgacagcagcagcggctggaccgccggcgccgccgcctactacgtgggctacctgcagcccaggaccttcctgctgaagtacaacgagaacggcaccatcaccgacgccgtggactgcgccctggaccccctgagcgagaccaagtgcaccctgaagagcttcaccgtggagaagggcatctaccagaccagcaacttcagggtgcagcccaccgagagcatcgtgaggttccccaacatcaccaacctgtgccccttcggcgaggtgttcaacgccaccaggttcgccagcgtgtacgcctggaacaggaagaggatcagcaactgcgtggccgactacagcgtgctgtacaacagcgccagcttcagcaccttcaagtgctacggcgtgagccccaccaagctgaacgacctgtgcttcaccaacgtgtacgccgacagcttcgtgatcaggggcgacgaggtgaggcagatcgcccccggccagaccggcaagatcgccgactacaactacaagctgcccgacgacttcaccggctgcgtgatcgcctggaacagcaacaacctggacagcaaggtgggcggcaactacaactacctgtacaggctgttcaggaagagcaacctgaagcccttcgagagggacatcagcaccgagatctaccaggccggcagcaccccctgcaacggcgtggagggcttcaactgctacttccccctgcagagctacggcttccagcccaccaacggcgtgggctaccagccctacagggtggtggtgctgagcttcgagctgctgcacgcccccgccaccgtgtgcggccccaagaagagcaccaacctggtgaagaacaagtgcgtgaacttcaacttcaacggcctgaccggcaccggcgtgctgaccgagagcaacaagaagttcctgcccttccagcagttcggcagggacatcgccgacaccaccgacgccgtgagggacccccagaccctggagatcctggacatcaccccctgcagcttcggcggcgtgagcgtgatcacccccggcaccaacaccagcaaccaggtggccgtgctgtaccaggacgtgaactgcaccgaggtgcccgtggccatccacgccgaccagctgacccccacctggagggtgtacagcaccggcagcaacgtgttccagaccagggccggctgcctgatcggcgccgagcacgtgaacaacagctacgagtgcgacatccccatcggcgccggcatctgcgccagctaccagacccagaccaacagccccggcagcgccagcagcgtggccagccagagcatcatcgcctacaccatgagcctgggcgccgagaacagcgtggcctacagcaacaacagcatcgccatccccaccaacttcaccatcagcgtgaccaccgagatcctgcccgtgagcatgaccaagaccagcgtggactgcaccatgtacatctgcggcgacagcaccgagtgcagcaacctgctgctgcagtacggcagcttctgcacccagctgaacagggccctgaccggcatcgccgtggagcaggacaagaacacccaggaggtgttcgcccaggtgaagcagatctacaagaccccccccatcaaggacttcggcggcttcaacttcagccagatcctgcccgaccccagcaagcccagcaagaggagccccatcgaggacctgctgttcaacaaggtgaccctggccgacgccggcttcatcaagcagtacggcgactgcctgggcgacatcgccgccagggacctgatctgcgcccagaagttcaacggcctgaccgtgctgccccccctgctgaccgacgagatgatcgcccagtacaccagcgccctgctggccggcaccatcaccagcggctggaccttcggcgccggccccgccctgcagatccccttccccatgcagatggcctacaggttcaacggcatcggcgtgacccagaacgtgctgtacgagaaccagaagctgatcgccaaccagttcaacagcgccatcggcaagatccaggacagcctgagcagcacccccagcgccctgggcaagctgcaggacgtggtgaaccagaacgcccaggccctgaacaccctggtgaagcagctgagcagcaacttcggcgccatcagcagcgtgctgaacgacatcctgagcaggctggacccccccgaggccgaggtgcagatcgacaggctgatcaccggcaggctgcagagcctgcagacctacgtgacccagcagctgatcagggccgccgagatcagggccagcgccaacctggccgccaccaagatgagcgagtgcgtgctgggccagagcaagagggtggacttctgcggcaagggctaccacctgatgagcttcccccagagcgccccccacggcgtggtgttcctgcacgtgacctacgtgcccgcccaggagaagaacttcaccaccgcccccgccatctgccacgacggcaaggcccacttccccagggagggcgtgttcgtgagcaacggcacccactggttcgtgacccagaggaacttctacgagccccagatcatcaccaccgacaacaccttcgtgagcggcaactgcgacgtggtgatcggcatcgtgaacaacaccgtgtacgaccccctgcagcccgagctggacagcttcaaggaggagctggacaagtacttcaagaaccacaccagccccgacgtggacctgggcgacatcagcggcatcaacgccagcgtggtgaacatccagaaggagatcgacaggctgaacgaggtggccaagaacctgaacgagagcctgatcgacctgcaggagctgggcaagtacgagcagtacatcaagtggccctggtacatctggctgggcttcatcgccggcctgatcgccatcgtgatggtgaccatcatgctgtgctgcatgaccagctgctgcagctgcctgaagggctgctgcagctgcggcagctgctgcaagttcgacgaggacgacagcgagcccgtgctgaagggcgtgaagctgcactacaccggaagcggagccacgaacttctctctgttaaagcaagcaggagatgttgaagaaaaccccgggcctatggagagcctggtgcccggcttcaacgagaagacccacgtgcagctgagcctgcccgtgctgcaggtgagggacgtgctggtgaggggcttcggcgacagcgtggaggaggtgctgagcgaggccaggcagcacctgaaggacggcacctgcggcctggtggaggtggagaagggcgtgctgccccagctggagcagccctacgtgttcatcaagaggagcgacgccaggaccgccccccacggccacgtgatggtggagctggtggccgagctggagggcatccagtacggcaggagcggcgagaccctgggcgtgctggtgccccacgtgggcgagatccccgtggcctacaggaaggtgctgctgaggaagaacggcaacaagggcgccggcggccacagctacggcgccgacctgaagagcttcgacctgggcgacgagctgggcaccgacccctacgaggacttccaggagaactggaacaccaagcacagcagcggcgtgaccagggagctgatgagggagctgaacggcggcggaagcggagagggcaggggaagtcttctaacatgcggggacgtggaggaaaatcccggccccgcctacaccaggtacgtggacaacaacttctgcggccccgacggctaccccctggagtgcatcaaggacctgctggccagggccggcaaggccagctgcaccctgagcgagcagctggacttcatcgacaccaagaggggcgtgtactgctgcagggagcacgagcacgagatcgcctggtacaccgagaggagcgagaagagctacgagctgcagacccccttcgagatcaagctggccaagaagttcgacaccttcaacggcgagtgccccaacttcgtgttccccctgaacagcatcatcaagaccatccagcccagggtggagaagaagaagctggacggcttcatgggcaggatcaggagcgtgtaccccgtggccagccccaacgagtgcaaccagatgtgcctgagcaccctgatgaagtgcgaccactgcggcgagaccagctggcagaccggcgacttcgtgaaggccacctgcgagttctgcggcaccgagaacctgaccaaggagggcgccaccacctgcggctacctgccccagaacgccgtggtgaagatctactgccccgcctgccacaacagcgaggtgggccccgagcacagcctggccgagtaccacaacgagagcggcctgaagaccatcctgaggaagggcggcaggaccatcgccttcggcggctgcgtgttcagctacgtgggctgccacaacaagtgcgcctactgggtgcccagggccagcgccaacatcggctgcaaccacaccggcgtggtgggcgagggcagcgagggcctgaacgacaacctgctggagatcctgcagaaggagaaggtgaacatcaacatcgtgggcgacttcaagctgaacgaggagatcgccatcatcctggccagcttcagcgccagcaccagcgccttcgtggagaccgtgaagggcctggactacaaggccttcaagcagatcgtggagagctgcggcaacttcaaggtgaccaagggcaaggccaagaagggcgcctggaacatcggcgagcagaagagcatcctgagccccctgtacgccttcgccagcgaggccgccagggtggtgaggagcatcttcagcaggaccctggagaccgcccagaacagcgtgagggtgctgcagaaggccgccatcaccatcctggacggcatcagccagtacagcctgaggctgatcgacgccatgatgttcaccagcgacctggccaccaacaacctggtggtgatggcctacatcaccggcggcgtggtgcagctgaccagccagtggctgaccaacatcttcggcaccgtgtacgagaagctgaagcccgtgctggactggctggaggagaagttcaaggagggcgtggagttcctgagggacggctgggagatcgtgaagttcatcagcacctgcgcctgcgagatcgtgggcggccagatcgtgacctgcgccaaggagatcaaggagagcgtgcagaccttcttcaagctggtgaacaagttcctggccctgtgcgccgacagcatcatcatcggcggcgccaagctgaaggccctgaacctgggcgagaccttcgtgacccacagcaagggcctgtacaggaagtgcgtgaagagcagggaggagaccggcctgctgatgcccctgaaggcccccaaggagatcatcttcctggagggcgagaccctgcccaccgaggtgctgaccgaggaggtggtgctgaagaccggcgacctgcagcccctggagcagcccaccagcgaggccgtggaggcccccctggtgggcacccccgtgtgcatcaacggcctgatgctgctggagatcaaggacaccgagaagtactgcgccctggcccccaacatgatggtgaccaacaacaccttcaccctgaagggcggctgatga

SEQ ID NO: 309 - RNA, 5736 nt, synthetic construct
  source 1..5736: mol_type = other RNA; note = Synthesized Vaccine Candidate 24
atgttcgtgttcctggtgctgctgcccctggtgagcagccagtgcgtgaacctgaccaccaggacccagctgccccccgcctacaccaacagcttcaccaggggcgtgtactaccccgacaaggtgttcaggagcagcgtgctgcacagcacccaggacctgttcctgcccttcttcagcaacgtgacctggttccacgccatccacgtgagcggcaccaacggcaccaagaggttcgacaaccccgtgctgcccttcaacgacggcgtgtacttcgccagcaccgagaagagcaacatcatcaggggctggatcttcggcaccaccctggacagcaagacccagagcctgctgatcgtgaacaacgccaccaacgtggtgatcaaggtgtgcgagttccagttctgcaacgaccccttcctgggcgtgtactaccacaagaacaacaagagctggatggagagcgagttcagggtgtacagcagcgccaacaactgcaccttcgagtacgtgagccagcccttcctgatggacctggagggcaagcagggcaacttcaagaacctgagggagttcgtgttcaagaacatcgacggctacttcaagatctacagcaagcacacccccatcaacctggtgagggacctgccccagggcttcagcgccctggagcccctggtggacctgcccatcggcatcaacatcaccaggttccagaccctgctggccctgcacaggagctacctgacccccggcgacagcagcagcggctggaccgccggcgccgccgcctactacgtgggctacctgcagcccaggaccttcctgctgaagtacaacgagaacggcaccatcaccgacgccgtggactgcgccctggaccccctgagcgagaccaagtgcaccctgaagagcttcaccgtggagaagggcatctaccagaccagcaacttcagggtgcagcccaccgagagcatcgtgaggttccccaacatcaccaacctgtgccccttcggcgaggtgttcaacgccaccaggttcgccagcgtgtacgcctggaacaggaagaggatcagcaactgcgtggccgactacagcgtgctgtacaacagcgccagcttcagcaccttcaagtgctacggcgtgagccccaccaagctgaacgacctgtgcttcaccaacgtgtacgccgacagcttcgtgatcaggggcgacgaggtgaggcagatcgcccccggccagaccggcaagatcgccgactacaactacaagctgcccgacgacttcaccggctgcgtgatcgcctggaacagcaacaacctggacagcaaggtgggcggcaactacaactacctgtacaggctgttcaggaagagcaacctgaagcccttcgagagggacatcagcaccgagatctaccaggccggcagcaccccctgcaacggcgtggagggcttcaactgctacttccccctgcagagctacggcttccagcccaccaacggcgtgggctaccagccctacagggtggtggtgctgagcttcgagctgctgcacgcccccgccaccgtgtgcggccccaagaagagcaccaacctggtgaagaacaagtgcgtgaacttcaacttcaacggcctgaccggcaccggcgtgctgaccgagagcaacaagaagttcctgcccttccagcagttcggcagggacatcgccgacaccaccgacgccgtgagggacccccagaccctggagatcctggacatcaccccctgcagcttcggcggcgtgagcgtgatcacccccggcaccaacaccagcaaccaggtggccgtgctgtaccaggacgtgaactgcaccgaggtgcccgtggccatccacgccgaccagctgacccccacctggagggtgtacagcaccggcagcaacgtgttccagaccagggccggctgcctgatcggcgccgagcacgtgaacaacagctacgagtgcgacatccccatcggcgccggcatctgcgccagctaccagacccagaccaacagccccaggagggccaggagcgtggccagccagagcatcatcgcctacaccatgagcctgggcgccgagaacagcgtggcctacagcaacaacagcatcgccatccccaccaacttcaccatcagcgtgaccaccgagatcctgcccgtgagcatgaccaagaccagcgtggactgcaccatgtacatctgcggcgacagcaccgagtgcagcaacctgctgctgcagtacggcagcttctgcacccagctgaacagggccctgaccggcatcgccgtggagcaggacaagaacacccaggaggtgttcgcccaggtgaagcagatctacaagaccccccccatcaaggacttcggcggcttcaacttcagccagatcctgcccgaccccagcaagcccagcaagaggagcttcatcgaggacctgctgttcaacaaggtgaccctggccgacgccggcttcatcaagcagtacggcgactgcctgggcgacatcgccgccagggacctgatctgcgcccagaagttcaacggcctgaccgtgctgccccccctgctgaccgacgagatgatcgcccagtacaccagcgccctgctggccggcaccatcaccagcggctggaccttcggcgccggcgccgccctgcagatccccttcgccatgcagatggcctacaggttcaacggcatcggcgtgacccagaacgtgctgtacgagaaccagaagctgatcgccaaccagttcaacagcgccatcggcaagatccaggacagcctgagcagcaccgccagcgccctgggcaagctgcaggacgtggtgaaccagaacgcccaggccctgaacaccctggtgaagcagctgagcagcaacttcggcgccatcagcagcgtgctgaacgacatcctgagcaggctggacccccccgaggccgaggtgcagatcgacaggctgatcaccggcaggctgcagagcctgcagacctacgtgacccagcagctgatcagggccgccgagatcagggccagcgccaacctggccgccaccaagatgagcgagtgcgtgctgggccagagcaagagggtggacttctgcggcaagggctaccacctgatgagcttcccccagagcgccccccacggcgtggtgttcctgcacgtgacctacgtgcccgcccaggagaagaacttcaccaccgcccccgccatctgccacgacggcaaggcccacttccccagggagggcgtgttcgtgagcaacggcacccactggttcgtgacccagaggaacttctacgagccccagatcatcaccaccgacaacaccttcgtgagcggcaactgcgacgtggtgatcggcatcgtgaacaacaccgtgtacgaccccctgcagcccgagctggacagcttcaaggaggagctggacaagtacttcaagaaccacaccagccccgacgtggacctgggcgacatcagcggcatcaacgccagcgtggtgaacatccagaaggagatcgacaggctgaacgaggtggccaagaacctgaacgagagcctgatcgacctgcaggagctgggcaagtacgagcagtacatcaagtggccctggtacatctggctgggcttcatcgccggcctgatcgccatcgtgatggtgaccatcatgctgtgctgcatgaccagctgctgcagctgcctgaagggctgctgcagctgcggcagctgctgcaagttcgacgaggacgacagcgagcccgtgctgaagggcgtgaagctgcactacaccggaagcggagccacgaacttctctctgttaaagcaagcaggagatgttgaagaaaaccccgggcctagcgccgtgaagaggaccatcaagggcacccaccactggctgctgctgaccatcctgaccagcctgctggtgctggtgcagagcacccagtggagcctgttcttcttcctgtacgagaacgccttcctgcccttcgccatgggcatcatcgccatgagcgccttcgccatgatgttcgtgaagcacaagcacgccttcctgtgcctgttcctgctgcccagcctggccaccgtggcctacttcaacatggtgtacatgcccgccagctgggtgatgaggatcatgacctggctggacatggtggacaccagcctgagcggcttcaagctgaaggactgcgtgatgtacgccagcgccgtggtgctgctgatcctgatgaccgccaggaccgtgtacgacgacggcgccaggagggtgtggaccctgatgaacgtgctgaccctggtgtacaaggtgtactacggcaacgccctggaccaggccatcagcatgtgggccctgatcatcagcgtgaccagcaactacagcggcgtggtgaccaccgtgatgttcctggccaggggcatcgtgttcatgtgcgtggagtactgccccatcttcttcatcaccggcaacaccctgcagtgcatcatgctggtgtactgcttcctgggctacttctgcacctgctacttcggcctgttctgcctgctgaacaggtacttcaggctgaccctgggcgtgtacgactacctggtgagcacccaggagttcaggtacatgaacagccagggcctgctgccccccaagaacagcatcgacgccttcaagctgaacatcaagctgctgggcgtgggcggcaagccctgcatcaaggtggccaccgtgcagggaagcggagagggcaggggaagtcttctaacatgcggggacgtggaggaaaatcccggccccagcaagatgagcgacgtgaagtgcaccagcgtggtgctgctgagcgtgctgcagcagctgagggtggagagcagcagcaagctgtgggcccagtgcgtgcagctgcacaacgacatcctgctggccaaggacaccaccgaggccttcgagaagatggtgagcctgctgagcgtgctgctgagcatgcagggcgccgtggacatcaacaagctgtgcgaggagatgctggacaacagggccaccctgcagggaagcggacagtgtactaattatgctctcttgaaattggctggagatgttgagagcaacccaggtcccgccatcgccagcgagttcagcagcctgcccagctacgccgccttcgccaccgcccaggaggcctacgagcaggccgtggccaacggcgacagcgaggtggtgctgaagaagctgaagaagagcctgaacgtggccaagagcgagttcgacagggacgccgccatgcagaggaagctggagaagatggccgaccaggccatgacccagatgtacaagcaggccaggagcgaggacaagagggccaaggtgaccagcgccatgcagaccatgctgttcaccatgctgaggaagctggacaacgacgccctgaacaacatcatcaacaacgccagggacggctgcgtgcccctgaacatcatccccctgaccaccgccgccaagctgatggtggtgatccccgactacaacacctacaagaacacctgcgacggcaccaccttcacctacgccagcgccctgtgggagatccagcaggtggtggacgccgacagcaagatcgtgcagctgagcgagatcagcatggacaacagccccaacctggcctggcccctgatcgtgaccgccctgagggccaacagcgccgtgaagctgcagtgatga

SEQ ID NO: 310 - RNA, 5736 nt, synthetic construct
  source 1..5736: mol_type = other RNA; note = Synthesized Vaccine Candidate 25
atgttcgtgttcctggtgctgctgcccctggtgagcagccagtgcgtgaacctgaccaccaggacccagctgccccccgcctacaccaacagcttcaccaggggcgtgtactaccccgacaaggtgttcaggagcagcgtgctgcacagcacccaggacctgttcctgcccttcttcagcaacgtgacctggttccacgccatccacgtgagcggcaccaacggcaccaagaggttcgacaaccccgtgctgcccttcaacgacggcgtgtacttcgccagcaccgagaagagcaacatcatcaggggctggatcttcggcaccaccctggacagcaagacccagagcctgctgatcgtgaacaacgccaccaacgtggtgatcaaggtgtgcgagttccagttctgcaacgaccccttcctgggcgtgtactaccacaagaacaacaagagctggatggagagcgagttcagggtgtacagcagcgccaacaactgcaccttcgagtacgtgagccagcccttcctgatggacctggagggcaagcagggcaacttcaagaacctgagggagttcgtgttcaagaacatcgacggctacttcaagatctacagcaagcacacccccatcaacctggtgagggacctgccccagggcttcagcgccctggagcccctggtggacctgcccatcggcatcaacatcaccaggttccagaccctgctggccctgcacaggagctacctgacccccggcgacagcagcagcggctggaccgccggcgccgccgcctactacgtgggctacctgcagcccaggaccttcctgctgaagtacaacgagaacggcaccatcaccgacgccgtggactgcgccctggaccccctgagcgagaccaagtgcaccctgaagagcttcaccgtggagaagggcatctaccagaccagcaacttcagggtgcagcccaccgagagcatcgtgaggttccccaacatcaccaacctgtgccccttcggcgaggtgttcaacgccaccaggttcgccagcgtgtacgcctggaacaggaagaggatcagcaactgcgtggccgactacagcgtgctgtacaacagcgccagcttcagcaccttcaagtgctacggcgtgagccccaccaagctgaacgacctgtgcttcaccaacgtgtacgccgacagcttcgtgatcaggggcgacgaggtgaggcagatcgcccccggccagaccggcaagatcgccgactacaactacaagctgcccgacgacttcaccggctgcgtgatcgcctggaacagcaacaacctggacagcaaggtgggcggcaactacaactacctgtacaggctgttcaggaagagcaacctgaagcccttcgagagggacatcagcaccgagatctaccaggccggcagcaccccctgcaacggcgtggagggcttcaactgctacttccccctgcagagctacggcttccagcccaccaacggcgtgggctaccagccctacagggtggtggtgctgagcttcgagctgctgcacgcccccgccaccgtgtgcggccccaagaagagcaccaacctggtgaagaacaagtgcgtgaacttcaacttcaacggcctgaccggcaccggcgtgctgaccgagagcaacaagaagttcctgcccttccagcagttcggcagggacatcgccgacaccaccgacgccgtgagggacccccagaccctggagatcctggacatcaccccctgcagcttcggcggcgtgagcgtgatcacccccggcaccaacaccagcaaccaggtggccgtgctgtaccaggacgtgaactgcaccgaggtgcccgtggccatccacgccgaccagctgacccccacctggagggtgtacagcaccggcagcaacgtgttccagaccagggccggctgcctgatcggcgccgagcacgtgaacaacagctacgagtgcgacatccccatcggcgccggcatctgcgccagctaccagacccagaccaacagccccggcagcgccagcagcgtggccagccagagcatcatcgcctacaccatgagcctgggcgccgagaacagcgtggcctacagcaacaacagcatcgccatccccaccaacttcaccatcagcgtgaccaccgagatcctgcccgtgagcatgaccaagaccagcgtggactgcaccatgtacatctgcggcgacagcaccgagtgcagcaacctgctgctgcagtacggcagcttctgcacccagctgaacagggccctgaccggcatcgccgtggagcaggacaagaacacccaggaggtgttcgcccaggtgaagcagatctacaagaccccccccatcaaggacttcggcggcttcaacttcagccagatcctgcccgaccccagcaagcccagcaagaggagccccatcgaggacctgctgttcaacaaggtgaccctggccgacgccggcttcatcaagcagtacggcgactgcctgggcgacatcgccgccagggacctgatctgcgcccagaagttcaacggcctgaccgtgctgccccccctgctgaccgacgagatgatcgcccagtacaccagcgccctgctggccggcaccatcaccagcggctggaccttcggcgccggccccgccctgcagatccccttccccatgcagatggcctacaggttcaacggcatcggcgtgacccagaacgtgctgtacgagaaccagaagctgatcgccaaccagttcaacagcgccatcggcaagatccaggacagcctgagcagcacccccagcgccctgggcaagctgcaggacgtggtgaaccagaacgcccaggccctgaacaccctggtgaagcagctgagcagcaacttcggcgccatcagcagcgtgctgaacgacatcctgagcaggctggacccccccgaggccgaggtgcagatcgacaggctgatcaccggcaggctgcagagcctgcagacctacgtgacccagcagctgatcagggccgccgagatcagggccagcgccaacctggccgccaccaagatgagcgagtgcgtgctgggccagagcaagagggtggacttctgcggcaagggctaccacctgatgagcttcccccagagcgccccccacggcgtggtgttcctgcacgtgacctacgtgcccgcccaggagaagaacttcaccaccgcccccgccatctgccacgacggcaaggcccacttccccagggagggcgtgttcgtgagcaacggcacccactggttcgtgacccagaggaacttctacgagccccagatcatcaccaccgacaacaccttcgtgagcggcaactgcgacgtggtgatcggcatcgtgaacaacaccgtgtacgaccccctgcagcccgagctggacagcttcaaggaggagctggacaagtacttcaagaaccacaccagccccgacgtggacctgggcgacatcagcggcatcaacgccagcgtggtgaacatccagaaggagatcgacaggctgaacgaggtggccaagaacctgaacgagagcctgatcgacctgcaggagctgggcaagtacgagcagtacatcaagtggccctggtacatctggctgggcttcatcgccggcctgatcgccatcgtgatggtgaccatcatgctgtgctgcatgaccagctgctgcagctgcctgaagggctgctgcagctgcggcagctgctgcaagttcgacgaggacgacagcgagcccgtgctgaagggcgtgaagctgcactacaccggaagcggagccacgaacttctctctgttaaagcaagcaggagatgttgaagaaaaccccgggcctagcgccgtgaagaggaccatcaagggcacccaccactggctgctgctgaccatcctgaccagcctgctggtgctggtgcagagcacccagtggagcctgttcttcttcctgtacgagaacgccttcctgcccttcgccatgggcatcatcgccatgagcgccttcgccatgatgttcgtgaagcacaagcacgccttcctgtgcctgttcctgctgcccagcctggccaccgtggcctacttcaacatggtgtacatgcccgccagctgggtgatgaggatcatgacctggctggacatggtggacaccagcctgagcggcttcaagctgaaggactgcgtgatgtacgccagcgccgtggtgctgctgatcctgatgaccgccaggaccgtgtacgacgacggcgccaggagggtgtggaccctgatgaacgtgctgaccctggtgtacaaggtgtactacggcaacgccctggaccaggccatcagcatgtgggccctgatcatcagcgtgaccagcaactacagcggcgtggtgaccaccgtgatgttcctggccaggggcatcgtgttcatgtgcgtggagtactgccccatcttcttcatcaccggcaacaccctgcagtgcatcatgctggtgtactgcttcctgggctacttctgcacctgctacttcggcctgttctgcctgctgaacaggtacttcaggctgaccctgggcgtgtacgactacctggtgagcacccaggagttcaggtacatgaacagccagggcctgctgccccccaagaacagcatcgacgccttcaagctgaacatcaagctgctgggcgtgggcggcaagccctgcatcaaggtggccaccgtgcagggaagcggagagggcaggggaagtcttctaacatgcggggacgtggaggaaaatcccggccccagcaagatgagcgacgtgaagtgcaccagcgtggtgctgctgagcgtgctgcagcagctgagggtggagagcagcagcaagctgtgggcccagtgcgtgcagctgcacaacgacatcctgctggccaaggacaccaccgaggccttcgagaagatggtgagcctgctgagcgtgctgctgagcatgcagggcgccgtggacatcaacaagctgtgcgaggagatgctggacaacagggccaccctgcagggaagcggacagtgtactaattatgctctcttgaaattggctggagatgttgagagcaacccaggtcccgccatcgccagcgagttcagcagcctgcccagctacgccgccttcgccaccgcccaggaggcctacgagcaggccgtggccaacggcgacagcgaggtggtgctgaagaagctgaagaagagcctgaacgtggccaagagcgagttcgacagggacgccgccatgcagaggaagctggagaagatggccgaccaggccatgacccagatgtacaagcaggccaggagcgaggacaagagggccaaggtgaccagcgccatgcagaccatgctgttcaccatgctgaggaagctggacaacgacgccctgaacaacatcatcaacaacgccagggacggctgcgtgcccctgaacatcatccccctgaccaccgccgccaagctgatggtggtgatccccgactacaacacctacaagaacacctgcgacggcaccaccttcacctacgccagcgccctgtgggagatccagcaggtggtggacgccgacagcaagatcgtgcagctgagcgagatcagcatggacaacagccccaacctggcctggcccctgatcgtgaccgccctgagggccaacagcgccgtgaagctgcagtgatga

SEQ ID NO: 311 - RNA, 6582 nt, synthetic construct
  source 1..6582: mol_type = other RNA; note = Synthesized Vaccine Candidate 26
atgttcgtgttcctggtgctgctgcccctggtgagcagccagtgcgtgaacctgaccaccaggacccagctgccccccgcctacaccaacagcttcaccaggggcgtgtactaccccgacaaggtgttcaggagcagcgtgctgcacagcacccaggacctgttcctgcccttcttcagcaacgtgacctggttccacgccatccacgtgagcggcaccaacggcaccaagaggttcgacaaccccgtgctgcccttcaacgacggcgtgtacttcgccagcaccgagaagagcaacatcatcaggggctggatcttcggcaccaccctggacagcaagacccagagcctgctgatcgtgaacaacgccaccaacgtggtgatcaaggtgtgcgagttccagttctgcaacgaccccttcctgggcgtgtactaccacaagaacaacaagagctggatggagagcgagttcagggtgtacagcagcgccaacaactgcaccttcgagtacgtgagccagcccttcctgatggacctggagggcaagcagggcaacttcaagaacctgagggagttcgtgttcaagaacatcgacggctacttcaagatctacagcaagcacacccccatcaacctggtgagggacctgccccagggcttcagcgccctggagcccctggtggacctgcccatcggcatcaacatcaccaggttccagaccctgctggccctgcacaggagctacctgacccccggcgacagcagcagcggctggaccgccggcgccgccgcctactacgtgggctacctgcagcccaggaccttcctgctgaagtacaacgagaacggcaccatcaccgacgccgtggactgcgccctggaccccctgagcgagaccaagtgcaccctgaagagcttcaccgtggagaagggcatctaccagaccagcaacttcagggtgcagcccaccgagagcatcgtgaggttccccaacatcaccaacctgtgccccttcggcgaggtgttcaacgccaccaggttcgccagcgtgtacgcctggaacaggaagaggatcagcaactgcgtggccgactacagcgtgctgtacaacagcgccagcttcagcaccttcaagtgctacggcgtgagccccaccaagctgaacgacctgtgcttcaccaacgtgtacgccgacagcttcgtgatcaggggcgacgaggtgaggcagatcgcccccggccagaccggcaagatcgccgactacaactacaagctgcccgacgacttcaccggctgcgtgatcgcctggaacagcaacaacctggacagcaaggtgggcggcaactacaactacctgtacaggctgttcaggaagagcaacctgaagcccttcgagagggacatcagcaccgagatctaccaggccggcagcaccccctgcaacggcgtggagggcttcaactgctacttccccctgcagagctacggcttccagcccaccaacggcgtgggctaccagccctacagggtggtggtgctgagcttcgagctgctgcacgcccccgccaccgtgtgcggccccaagaagagcaccaacctggtgaagaacaagtgcgtgaacttcaacttcaacggcctgaccggcaccggcgtgctgaccgagagcaacaagaagttcctgcccttccagcagttcggcagggacatcgccgacaccaccgacgccgtgagggacccccagaccctggagatcctggacatcaccccctgcagcttcggcggcgtgagcgtgatcacccccggcaccaacaccagcaaccaggtggccgtgctgtaccaggacgtgaactgcaccgaggtgcccgtggccatccacgccgaccagctgacccccacctggagggtgtacagcaccggcagcaacgtgttccagaccagggccggctgcctgatcggcgccgagcacgtgaacaacagctacgagtgcgacatccccatcggcgccggcatctgcgccagctaccagacccagaccaacagccccaggagggccaggagcgtggccagccagagcatcatcgcctacaccatgagcctgggcgccgagaacagcgtggcctacagcaacaacagcatcgccatccccaccaacttcaccatcagcgtgaccaccgagatcctgcccgtgagcatgaccaagaccagcgtggactgcaccatgtacatctgcggcgacagcaccgagtgcagcaacctgctgctgcagtacggcagcttctgcacccagctgaacagggccctgaccggcatcgccgtggagcaggacaagaacacccaggaggtgttcgcccaggtgaagcagatctacaagaccccccccatcaaggacttcggcggcttcaacttcagccagatcctgcccgaccccagcaagcccagcaagaggagcttcatcgaggacctgctgttcaacaaggtgaccctggccgacgccggcttcatcaagcagtacggcgactgcctgggcgacatcgccgccagggacctgatctgcgcccagaagttcaacggcctgaccgtgctgccccccctgctgaccgacgagatgatcgcccagtacaccagcgccctgctggccggcaccatcaccagcggctggaccttcggcgccggcgccgccctgcagatccccttcgccatgcagatggcctacaggttcaacggcatcggcgtgacccagaacgtgctgtacgagaaccagaagctgatcgccaaccagttcaacagcgccatcggcaagatccaggacagcctgagcagcaccgccagcgccctgggcaagctgcaggacgtggtgaaccagaacgcccaggccctgaacaccctggtgaagcagctgagcagcaacttcggcgccatcagcagcgtgctgaacgacatcctgagcaggctggacccccccgaggccgaggtgcagatcgacaggctgatcaccggcaggctgcagagcctgcagacctacgtgacccagcagctgatcagggccgccgagatcagggccagcgccaacctggccgccaccaagatgagcgagtgcgtgctgggccagagcaagagggtggacttctgcggcaagggctaccacctgatgagcttcccccagagcgccccccacggcgtggtgttcctgcacgtgacctacgtgcccgcccaggagaagaacttcaccaccgcccccgccatctgccacgacggcaaggcccacttccccagggagggcgtgttcgtgagcaacggcacccactggttcgtgacccagaggaacttctacgagccccagatcatcaccaccgacaacaccttcgtgagcggcaactgcgacgtggtgatcggcatcgtgaacaacaccgtgtacgaccccctgcagcccgagctggacagcttcaaggaggagctggacaagtacttcaagaaccacaccagccccgacgtggacctgggcgacatcagcggcatcaacgccagcgtggtgaacatccagaaggagatcgacaggctgaacgaggtggccaagaacctgaacgagagcctgatcgacctgcaggagctgggcaagtacgagcagtacatcaagtggccctggtacatctggctgggcttcatcgccggcctgatcgccatcgtgatggtgaccatcatgctgtgctgcatgaccagctgctgcagctgcctgaagggctgctgcagctgcggcagctgctgcaagttcgacgaggacgacagcgagcccgtgctgaagggcgtgaagctgcactacaccggaagcggagccacgaacttctctctgttaaagcaagcaggagatgttgaagaaaaccccgggcctaacaacgagctgagccccgtggccctgaggcagatgagctgcgccgccggcaccacccagaccgcctgcaccgacgacaacgccctggcctactacaacaccaccaagggcggcaggttcgtgctggccctgctgagcgacctgcaggacctgaagtgggccaggttccccaagagcgacggcaccggcaccatctacaccgagctggagcccccctgcaggttcgtgaccgacacccccaagggccccaaggtgaagtacctgtacttcatcaagggcctgaacaacctgaacaggggcatggtgctgggcagcctggccgccaccgtgaggctgcagggaagcggagagggcaggggaagtcttctaacatgcggggacgtggaggaaaatcccggccccgccggcaacgccaccgaggtgcccgccaacagcaccgtgctgagcttctgcgccttcgccgtggacgccgccaaggcctacaaggactacctggccagcggcggccagcccatcaccaactgcgtgaagatgctgtgcacccacaccggcaccggccaggccatcaccgtgacccccgaggccaacatggaccaggagagcttcggcggcgccagctgctgcctgtactgcaggtgccacatcgaccaccccaaccccaagggcttctgcgacctgaagggcaagtacgtgcagatccccaccacctgcgccaacgaccccgtgggcttcaccctgaagaacaccgtgtgcaccgtgtgcggcatgtggaagggctacggctgcagctgcgaccagctgagggagcccatgctgcagggaagcggacagtgtactaattatgctctcttgaaattggctggagatgttgagagcaacccaggtcccgccgtgggcgcctgcgtgctgtgcaacagccagaccagcctgaggtgcggcgcctgcatcaggaggcccttcctgtgctgcaagtgctgctacgaccacgtgatcagcaccagccacaagctggtgctgagcgtgaacccctacgtgtgcaacgcccccggctgcgacgtgaccgacgtgacccagctgtacctgggcggcatgagctactactgcaagagccacaagccccccatcagcttccccctgtgcgccaacggccaggtgttcggcctgtacaagaacacctgcgtgggcagcgacaacgtgaccgacttcaacgccatcgccacctgcgactggaccaacgccggcgactacatcctggccaacacctgcaccgagaggctgaagctgttcgccgccgagaccctgaaggccaccgaggagaccttcaagctgagctacggcatcgccaccgtgagggaggtgctgagcgacagggagctgcacctgagctgggaggtgggcaagcccaggccccccctgaacaggaactacgtgttcaccggctacagggtgaccaagaacagcaaggtgcagatcggcgagtacaccttcgagaagggcgactacggcgacgccgtggtgtacaggggcaccaccacctacaagctgaacgtgggcgactacttcgtgctgaccagccacaccgtgatgcccctgagcgcccccaccctggtgccccaggagcactacgtgaggatcaccggcctgtaccccaccctgaacatcagcgacgagttcagcagcaacgtggccaactaccagaaggtgggcatgcagaagtacagcaccctgcagggcccccccggcaccggcaagagccacttcgccatcggcctggccctgtactaccccagcgccaggatcgtgtacaccgcctgcagccacgccgccgtggacgccctgtgcgagaaggccctgaagtacctgcccatcgacaagtgcagcaggatcatccccgccagggccagggtggagtgcttcgacaagttcaaggtgaacagcaccctggagcagtacgtgttctgcaccgtgaacgccctgcccgagaccaccgccgacatcgtggtgttcgacgagatcagcatggccaccaactacgacctgagcgtggtgaacgccaggctgagggccaagcactacgtgtacatcggcgaccccgcccagctgcccgcccccaggaccctgctgaccaagggcaccctggagcccgagtacttcaacagcgtgtgcaggctgatgaagaccatcggccccgacatgttcctgggcacctgcaggaggtgccccgccgagatcgtggacaccgtgagcgccctggtgtacgacaacaagctgaaggcccacaaggacaagagcgcccagtgcttcaagatgttctacaagggcgtgatcacccacgacgtgagcagcgccatcaacaggccccagatcggcgtggtgagggagttcctgaccaggaaccccgcctggaggaaggccgtgttcatcagcccctacaacagccagaacgccgtggccagcaagatcctgggcctgcccacccagaccgtggacagcagccagggcagcgagtacgactacgtgatcttcacccagaccaccgagaccgcccacagctgcaacgtgaacaggttcaacgtggccatcaccagggccaaggtgggcatcctgtgcatcatgagcgacagggacctgtacgacaagctgcagttcaccagcctggagatccccaggaggaacgtggccaccctgcagtgatga

SEQ ID NO: 312 - RNA, 6582 nt, synthetic construct
  source 1..6582: mol_type = other RNA; note = Synthesized Vaccine Candidate 27
atgttcgtgttcctggtgctgctgcccctggtgagcagccagtgcgtgaacctgaccaccaggacccagctgccccccgcctacaccaacagcttcaccaggggcgtgtactaccccgacaaggtgttcaggagcagcgtgctgcacagcacccaggacctgttcctgcccttcttcagcaacgtgacctggttccacgccatccacgtgagcggcaccaacggcaccaagaggttcgacaaccccgtgctgcccttcaacgacggcgtgtacttcgccagcaccgagaagagcaacatcatcaggggctggatcttcggcaccaccctggacagcaagacccagagcctgctgatcgtgaacaacgccaccaacgtggtgatcaaggtgtgcgagttccagttctgcaacgaccccttcctgggcgtgtactaccacaagaacaacaagagctggatggagagcgagttcagggtgtacagcagcgccaacaactgcaccttcgagtacgtgagccagcccttcctgatggacctggagggcaagcagggcaacttcaagaacctgagggagttcgtgttcaagaacatcgacggctacttcaagatctacagcaagcacacccccatcaacctggtgagggacctgccccagggcttcagcgccctggagcccctggtggacctgcccatcggcatcaacatcaccaggttccagaccctgctggccctgcacaggagctacctgacccccggcgacagcagcagcggctggaccgccggcgccgccgcctactacgtgggctacctgcagcccaggaccttcctgctgaagtacaacgagaacggcaccatcaccgacgccgtggactgcgccctggaccccctgagcgagaccaagtgcaccctgaagagcttcaccgtggagaagggcatctaccagaccagcaacttcagggtgcagcccaccgagagcatcgtgaggttccccaacatcaccaacctgtgccccttcggcgaggtgttcaacgccaccaggttcgccagcgtgtacgcctggaacaggaagaggatcagcaactgcgtggccgactacagcgtgctgtacaacagcgccagcttcagcaccttcaagtgctacggcgtgagccccaccaagctgaacgacctgtgcttcaccaacgtgtacgccgacagcttcgtgatcaggggcgacgaggtgaggcagatcgcccccggccagaccggcaagatcgccgactacaactacaagctgcccgacgacttcaccggctgcgtgatcgcctggaacagcaacaacctggacagcaaggtgggcggcaactacaactacctgtacaggctgttcaggaagagcaacctgaagcccttcgagagggacatcagcaccgagatctaccaggccggcagcaccccctgcaacggcgtggagggcttcaactgctacttccccctgcagagctacggcttccagcccaccaacggcgtgggctaccagccctacagggtggtggtgctgagcttcgagctgctgcacgcccccgccaccgtgtgcggccccaagaagagcaccaacctggtgaagaacaagtgcgtgaacttcaacttcaacggcctgaccggcaccggcgtgctgaccgagagcaacaagaagttcctgcccttccagcagttcggcagggacatcgccgacaccaccgacgccgtgagggacccccagaccctggagatcctggacatcaccccctgcagcttcggcggcgtgagcgtgatcacccccggcaccaacaccagcaaccaggtggccgtgctgtaccaggacgtgaactgcaccgaggtgcccgtggccatccacgccgaccagctgacccccacctggagggtgtacagcaccggcagcaacgtgttccagaccagggccggctgcctgatcggcgccgagcacgtgaacaacagctacgagtgcgacatccccatcggcgccggcatctgcgccagctaccagacccagaccaacagccccggcagcgccagcagcgtggccagccagagcatcatcgcctacaccatgagcctgggcgccgagaacagcgtggcctacagcaacaacagcatcgccatccccaccaacttcaccatcagcgtgaccaccgagatcctgcccgtgagcatgaccaagaccagcgtggactgcaccatgtacatctgcggcgacagcaccgagtgcagcaacctgctgctgcagtacggcagcttctgcacccagctgaacagggccctgaccggcatcgccgtggagcaggacaagaacacccaggaggtgttcgcccaggtgaagcagatctacaagaccccccccatcaaggacttcggcggcttcaacttcagccagatcctgcccgaccccagcaagcccagcaagaggagccccatcgaggacctgctgttcaacaaggtgaccctggccgacgccggcttcatcaagcagtacggcgactgcctgggcgacatcgccgccagggacctgatctgcgcccagaagttcaacggcctgaccgtgctgccccccctgctgaccgacgagatgatcgcccagtacaccagcgccctgctggccggcaccatcaccagcggctggaccttcggcgccggccccgccctgcagatccccttccccatgcagatggcctacaggttcaacggcatcggcgtgacccagaacgtgctgtacgagaaccagaagctgatcgccaaccagttcaacagcgccatcggcaagatccaggacagcctgagcagcacccccagcgccctgggcaagctgcaggacgtggtgaaccagaacgcccaggccctgaacaccctggtgaagcagctgagcagcaacttcggcgccatcagcagcgtgctgaacgacatcctgagcaggctggacccccccgaggccgaggtgcagatcgacaggctgatcaccggcaggctgcagagcctgcagacctacgtgacccagcagctgatcagggccgccgagatcagggccagcgccaacctggccgccaccaagatgagcgagtgcgtgctgggccagagcaagagggtggacttctgcggcaagggctaccacctgatgagcttcccccagagcgccccccacggcgtggtgttcctgcacgtgacctacgtgcccgcccaggagaagaacttcaccaccgcccccgccatctgccacgacggcaaggcccacttccccagggagggcgtgttcgtgagcaacggcacccactggttcgtgacccagaggaacttctacgagccccagatcatcaccaccgacaacaccttcgtgagcggcaactgcgacgtggtgatcggcatcgtgaacaacaccgtgtacgaccccctgcagcccgagctggacagcttcaaggaggagctggacaagtacttcaagaaccacaccagccccgacgtggacctgggcgacatcagcggcatcaacgccagcgtggtgaacatccagaaggagatcgacaggctgaacgaggtggccaagaacctgaacgagagcctgatcgacctgcaggagctgggcaagtacgagcagtacatcaagtggccctggtacatctggctgggcttcatcgccggcctgatcgccatcgtgatggtgaccatcatgctgtgctgcatgaccagctgctgcagctgcctgaagggctgctgcagctgcggcagctgctgcaagttcgacgaggacgacagcgagcccgtgctgaagggcgtgaagctgcactacaccggaagcggagccacgaacttctctctgttaaagcaagcaggagatgttgaagaaaaccccgggcctaacaacgagctgagccccgtggccctgaggcagatgagctgcgccgccggcaccacccagaccgcctgcaccgacgacaacgccctggcctactacaacaccaccaagggcggcaggttcgtgctggccctgctgagcgacctgcaggacctgaagtgggccaggttccccaagagcgacggcaccggcaccatctacaccgagctggagcccccctgcaggttcgtgaccgacacccccaagggccccaaggtgaagtacctgtacttcatcaagggcctgaacaacctgaacaggggcatggtgctgggcagcctggccgccaccgtgaggctgcagggaagcggagagggcaggggaagtcttctaacatgcggggacgtggaggaaaatcccggccccgccggcaacgccaccgaggtgcccgccaacagcaccgtgctgagcttctgcgccttcgccgtggacgccgccaaggcctacaaggactacctggccagcggcggccagcccatcaccaactgcgtgaagatgctgtgcacccacaccggcaccggccaggccatcaccgtgacccccgaggccaacatggaccaggagagcttcggcggcgccagctgctgcctgtactgcaggtgccacatcgaccaccccaaccccaagggcttctgcgacctgaagggcaagtacgtgcagatccccaccacctgcgccaacgaccccgtgggcttcaccctgaagaacaccgtgtgcaccgtgtgcggcatgtggaagggctacggctgcagctgcgaccagctgagggagcccatgctgcagggaagcggacagtgtactaattatgctctcttgaaattggctggagatgttgagagcaacccaggtcccgccgtgggcgcctgcgtgctgtgcaacagccagaccagcctgaggtgcggcgcctgcatcaggaggcccttcctgtgctgcaagtgctgctacgaccacgtgatcagcaccagccacaagctggtgctgagcgtgaacccctacgtgtgcaacgcccccggctgcgacgtgaccgacgtgacccagctgtacctgggcggcatgagctactactgcaagagccacaagccccccatcagcttccccctgtgcgccaacggccaggtgttcggcctgtacaagaacacctgcgtgggcagcgacaacgtgaccgacttcaacgccatcgccacctgcgactggaccaacgccggcgactacatcctggccaacacctgcaccgagaggctgaagctgttcgccgccgagaccctgaaggccaccgaggagaccttcaagctgagctacggcatcgccaccgtgagggaggtgctgagcgacagggagctgcacctgagctgggaggtgggcaagcccaggccccccctgaacaggaactacgtgttcaccggctacagggtgaccaagaacagcaaggtgcagatcggcgagtacaccttcgagaagggcgactacggcgacgccgtggtgtacaggggcaccaccacctacaagctgaacgtgggcgactacttcgtgctgaccagccacaccgtgatgcccctgagcgcccccaccctggtgccccaggagcactacgtgaggatcaccggcctgtaccccaccctgaacatcagcgacgagttcagcagcaacgtggccaactaccagaaggtgggcatgcagaagtacagcaccctgcagggcccccccggcaccggcaagagccacttcgccatcggcctggccctgtactaccccagcgccaggatcgtgtacaccgcctgcagccacgccgccgtggacgccctgtgcgagaaggccctgaagtacctgcccatcgacaagtgcagcaggatcatccccgccagggccagggtggagtgcttcgacaagttcaaggtgaacagcaccctggagcagtacgtgttctgcaccgtgaacgccctgcccgagaccaccgccgacatcgtggtgttcgacgagatcagcatggccaccaactacgacctgagcgtggtgaacgccaggctgagggccaagcactacgtgtacatcggcgaccccgcccagctgcccgcccccaggaccctgctgaccaagggcaccctggagcccgagtacttcaacagcgtgtgcaggctgatgaagaccatcggccccgacatgttcctgggcacctgcaggaggtgccccgccgagatcgtggacaccgtgagcgccctggtgtacgacaacaagctgaaggcccacaaggacaagagcgcccagtgcttcaagatgttctacaagggcgtgatcacccacgacgtgagcagcgccatcaacaggccccagatcggcgtggtgagggagttcctgaccaggaaccccgcctggaggaaggccgtgttcatcagcccctacaacagccagaacgccgtggccagcaagatcctgggcctgcccacccagaccgtggacagcagccagggcagcgagtacgactacgtgatcttcacccagaccaccgagaccgcccacagctgcaacgtgaacaggttcaacgtggccatcaccagggccaaggtgggcatcctgtgcatcatgagcgacagggacctgtacgacaagctgcagttcaccagcctggagatccccaggaggaacgtggccaccctgcagtgatga

SEQ ID NO: 313 - DNA, 6573 bp, synthetic construct
  source 1..6573: mol_type = other DNA; note = Synthesized Vaccine Candidate 28
atgttcgtgttcctggtgctgctgcccctggtgagcagccagtgcgtgaacctgaccaccaggacccagctgccccccgcctacaccaacagcttcaccaggggcgtgtactaccccgacaaggtgttcaggagcagcgtgctgcacagcacccaggacctgttcctgcccttcttcagcaacgtgacctggttccacgccatccacgtgagcggcaccaacggcaccaagaggttcgacaaccccgtgctgcccttcaacgacggcgtgtacttcgccagcaccgagaagagcaacatcatcaggggctggatcttcggcaccaccctggacagcaagacccagagcctgctgatcgtgaacaacgccaccaacgtggtgatcaaggtgtgcgagttccagttctgcaacgaccccttcctgggcgtgtactaccacaagaacaacaagagctggatggagagcgagttcagggtgtacagcagcgccaacaactgcaccttcgagtacgtgagccagcccttcctgatggacctggagggcaagcagggcaacttcaagaacctgagggagttcgtgttcaagaacatcgacggctacttcaagatctacagcaagcacacccccatcaacctggtgagggacctgccccagggcttcagcgccctggagcccctggtggacctgcccatcggcatcaacatcaccaggttccagaccctgctggccctgcacaggagctacctgacccccggcgacagcagcagcggctggaccgccggcgccgccgcctactacgtgggctacctgcagcccaggaccttcctgctgaagtacaacgagaacggcaccatcaccgacgccgtggactgcgccctggaccccctgagcgagaccaagtgcaccctgaagagcttcaccgtggagaagggcatctaccagaccagcaacttcagggtgcagcccaccgagagcatcgtgaggttccccaacatcaccaacctgtgccccttcggcgaggtgttcaacgccaccaggttcgccagcgtgtacgcctggaacaggaagaggatcagcaactgcgtggccgactacagcgtgctgtacaacagcgccagcttcagcaccttcaagtgctacggcgtgagccccaccaagctgaacgacctgtgcttcaccaacgtgtacgccgacagcttcgtgatcaggggcgacgaggtgaggcagatcgcccccggccagaccggcaagatcgccgactacaactacaagctgcccgacgacttcaccggctgcgtgatcgcctggaacagcaacaacctggacagcaaggtgggcggcaactacaactacctgtacaggctgttcaggaagagcaacctgaagcccttcgagagggacatcagcaccgagatctaccaggccggcagcaccccctgcaacggcgtggagggcttcaactgctacttccccctgcagagctacggcttccagcccaccaacggcgtgggctaccagccctacagggtggtggtgctgagcttcgagctgctgcacgcccccgccaccgtgtgcggccccaagaagagcaccaacctggtgaagaacaagtgcgtgaacttcaacttcaacggcctgaccggcaccggcgtgctgaccgagagcaacaagaagttcctgcccttccagcagttcggcagggacatcgccgacaccaccgacgccgtgagggacccccagaccctggagatcctggacatcaccccctgcagcttcggcggcgtgagcgtgatcacccccggcaccaacaccagcaaccaggtggccgtgctgtaccaggacgtgaactgcaccgaggtgcccgtggccatccacgccgaccagctgacccccacctggagggtgtacagcaccggcagcaacgtgttccagaccagggccggctgcctgatcggcgccgagcacgtgaacaacagctacgagtgcgacatccccatcggcgccggcatctgcgccagctaccagacccagaccaacagccccaggagggccaggagcgtggccagccagagcatcatcgcctacaccatgagcctgggcgccgagaacagcgtggcctacagcaacaacagcatcgccatccccaccaacttcaccatcagcgtgaccaccgagatcctgcccgtgagcatgaccaagaccagcgtggactgcaccatgtacatctgcggcgacagcaccgagtgcagcaacctgctgctgcagtacggcagcttctgcacccagctgaacagggccctgaccggcatcgccgtggagcaggacaagaacacccaggaggtgttcgcccaggtgaagcagatctacaagaccccccccatcaaggacttcggcggcttcaacttcagccagatcctgcccgaccccagcaagcccagcaagaggagcttcatcgaggacctgctgttcaacaaggtgaccctggccgacgccggcttcatcaagcagtacggcgactgcctgggcgacatcgccgccagggacctgatctgcgcccagaagttcaacggcctgaccgtgctgccccccctgctgaccgacgagatgatcgcccagtacaccagcgccctgctggccggcaccatcaccagcggctggaccttcggcgccggcgccgccctgcagatccccttcgccatgcagatggcctacaggttcaacggcatcggcgtgacccagaacgtgctgtacgagaaccagaagctgatcgccaaccagttcaacagcgccatcggcaagatccaggacagcctgagcagcaccgccagcgccctgggcaagctgcaggacgtggtgaaccagaacgcccaggccctgaacaccctggtgaagcagctgagcagcaacttcggcgccatcagcagcgtgctgaacgacatcctgagcaggctggacccccccgaggccgaggtgcagatcgacaggctgatcaccggcaggctgcagagcctgcagacctacgtgacccagcagctgatcagggccgccgagatcagggccagcgccaacctggccgccaccaagatgagcgagtgcgtgctgggccagagcaagagggtggacttctgcggcaagggctaccacctgatgagcttcccccagagcgccccccacggcgtggtgttcctgcacgtgacctacgtgcccgcccaggagaagaacttcaccaccgcccccgccatctgccacgacggcaaggcccacttccccagggagggcgtgttcgtgagcaacggcacccactggttcgtgacccagaggaacttctacgagccccagatcatcaccaccgacaacaccttcgtgagcggcaactgcgacgtggtgatcggcatcgtgaacaacaccgtgtacgaccccctgcagcccgagctggacagcttcaaggaggagctggacaagtacttcaagaaccacaccagccccgacgtggacctgggcgacatcagcggcatcaacgccagcgtggtgaacatccagaaggagatcgacaggctgaacgaggtggccaagaacctgaacgagagcctgatcgacctgcaggagctgggcaagtacgagcagtacatcaagtggccctggtacatctggctgggcttcatcgccggcctgatcgccatcgtgatggtgaccatcatgctgtgctgcatgaccagctgctgcagctgcctgaagggctgctgcagctgcggcagctgctgcaagttcgacgaggacgacagcgagcccgtgctgaagggcgtgaagctgcactacaccggaagcggagccacgaacttctctctgttaaagcaagcaggagatgttgaagaaaaccccgggcctgccgagaacgtgaccggcctgttcaaggactgcagcaaggtgatcaccggcctgcaccccacccaggcccccacccacctgagcgtggacaccaagttcaagaccgagggcctgtgcgtggacatccccggcatccccaaggacatgacctacaggaggctgatcagcatgatgggcttcaagatgaactaccaggtgaacggctaccccaacatgttcatcaccagggaggaggccatcaggcacgtgagggcctggatcggcttcgacgtggagggctgccacgccaccagggaggccgtgggcaccaacctgcccctgcagctgggcttcagcaccggcgtgaacctggtggccgtgcccaccggctacgtggacacccccaacaacaccgacttcagcagggtgagcgccaagcccccccccggcgaccagttcaagcacctgatccccctgatgtacaagggcctgccctggaacgtggtgaggatcaagatcgtgcagatgctgagcgacaccctgaagaacctgagcgacagggtggtgttcgtgctgtgggcccacggcttcgagctgaccagcatgaagtacttcgtgaagatcggccccgagaggacctgctgcctgtgcgacaggagggccacctgcttcagcaccgccagcgacacctacgcctgctggcaccacagcatcggcttcgactacgtgtacaaccccttcatgatcgacgtgcagcagtggggcttcaccggcaacctgcagagcaaccacgacctgtactgccaggtgcacggcaacgcccacgtggccagctgcgacgccatcatgaccaggtgcctggccgtgcacgagtgcttcgtgaagagggtggactggaccatcgagtaccccatcatcggcgacgagctgaagatcaacgccgcctgcaggaaggtgcagcacatggtggtgaaggccgccctgctggccgacaagttccccgtgctgcacgacatcggcaaccccaaggccatcaagtgcgtgccccaggccgacgtggagtggaagttctacgacgcccagccctgcagcgacaaggcctacaagatcgaggagctgttctacagctacgccacccacagcgacaagttcaccgacggcgtgtgcctgttctggaactgcaacgtggacaggtaccccgccaacagcatcgtgtgcaggttcgacaccagggtgctgagcaacctgaacctgcccggctgcgacggcggcagcctgtacgtgaacaagcacgccttccacacccccgccttcgacaagagcgccttcgtgaacctgaagcagctgcccttcttctactacagcgacagcccctgcgagagccacggcaagcaggtggtgagcgacatcgactacgtgcccctgaagagcgccacctgcatcaccaggtgcaacctgggcggcgccgtgtgcaggcaccacgccaacgagtacaggctgtacctggacgcctacaacatgatgatcagcgccggcttcagcctgtgggtgtacaagcagttcgacacctacaacctgtggaacaccttcaccaggctgcagggaagcggagagggcaggggaagtcttctaacatgcggggacgtggaggaaaatcccggccccagcctggagaacgtggccttcaacgtggtgaacaagggccacttcgacggccagcagggcgaggtgcccgtgagcatcatcaacaacaccgtgtacaccaaggtggacggcgtggacgtggagctgttcgagaacaagaccaccctgcccgtgaacgtggccttcgagctgtgggccaagaggaacatcaagcccgtgcccgaggtgaagatcctgaacaacctgggcgtggacatcgccgccaacaccgtgatctgggactacaagagggacgcccccgcccacatcagcaccatcggcgtgtgcagcatgaccgacatcgccaagaagcccaccgagaccatctgcgcccccctgaccgtgttcttcgacggcagggtggacggccaggtggacctgttcaggaacgccaggaacggcgtgctgatcaccgagggcagcgtgaagggcctgcagcccagcgtgggccccaagcaggccagcctgaacggcgtgaccctgatcggcgaggccgtgaagacccagttcaactactacaagaaggtggacggcgtggtgcagcagctgcccgagacctacttcacccagagcaggaacctgcaggagttcaagcccaggagccagatggagatcgacttcctggagctggccatggacgagttcatcgagaggtacaagctggagggctacgccttcgagcacatcgtgtacggcgacttcagccacagccagctgggcggcctgcacctgctgatcggcctggccaagaggttcaaggagagccccttcgagctggaggacttcatccccatggacagcaccgtgaagaactacttcatcaccgacgcccagaccggcagcagcaagtgcgtgtgcagcgtgatcgacctgctgctggacgacttcgtggagatcatcaagagccaggacctgagcgtggtgagcaaggtggtgaaggtgaccatcgactacaccgagatcagcttcatgctgtggtgcaaggacggccacgtggagaccttctaccccaagctgcagtgatga

SEQ ID NO: 314 - RNA, 6573 nt, synthetic construct
  source 1..6573: mol_type = other RNA; note = Synthesized Vaccine Candidate 29
atgttcgtgttcctggtgctgctgcccctggtgagcagccagtgcgtgaacctgaccaccaggacccagctgccccccgcctacaccaacagcttcaccaggggcgtgtactaccccgacaaggtgttcaggagcagcgtgctgcacagcacccaggacctgttcctgcccttcttcagcaacgtgacctggttccacgccatccacgtgagcggcaccaacggcaccaagaggttcgacaaccccgtgctgcccttcaacgacggcgtgtacttcgccagcaccgagaagagcaacatcatcaggggctggatcttcggcaccaccctggacagcaagacccagagcctgctgatcgtgaacaacgccaccaacgtggtgatcaaggtgtgcgagttccagttctgcaacgaccccttcctgggcgtgtactaccacaagaacaacaagagctggatggagagcgagttcagggtgtacagcagcgccaacaactgcaccttcgagtacgtgagccagcccttcctgatggacctggagggcaagcagggcaacttcaagaacctgagggagttcgtgttcaagaacatcgacggctacttcaagatctacagcaagcacacccccatcaacctggtgagggacctgccccagggcttcagcgccctggagcccctggtggacctgcccatcggcatcaacatcaccaggttccagaccctgctggccctgcacaggagctacctgacccccggcgacagcagcagcggctggaccgccggcgccgccgcctactacgtgggctacctgcagcccaggaccttcctgctgaagtacaacgagaacggcaccatcaccgacgccgtggactgcgccctggaccccctgagcgagaccaagtgcaccctgaagagcttcaccgtggagaagggcatctaccagaccagcaacttcagggtgcagcccaccgagagcatcgtgaggttccccaacatcaccaacctgtgccccttcggcgaggtgttcaacgccaccaggttcgccagcgtgtacgcctggaacaggaagaggatcagcaactgcgtggccgactacagcgtgctgtacaacagcgccagcttcagcaccttcaagtgctacggcgtgagccccaccaagctgaacgacctgtgcttcaccaacgtgtacgccgacagcttcgtgatcaggggcgacgaggtgaggcagatcgcccccggccagaccggcaagatcgccgactacaactacaagctgcccgacgacttcaccggctgcgtgatcgcctggaacagcaacaacctggacagcaaggtgggcggcaactacaactacctgtacaggctgttcaggaagagcaacctgaagcccttcgagagggacatcagcaccgagatctaccaggccggcagcaccccctgcaacggcgtggagggcttcaactgctacttccccctgcagagctacggcttccagcccaccaacggcgtgggctaccagccctacagggtggtggtgctgagcttcgagctgctgcacgcccccgccaccgtgtgcggccccaagaagagcaccaacctggtgaagaacaagtgcgtgaacttcaacttcaacggcctgaccggcaccggcgtgctgaccgagagcaacaagaagttcctgcccttccagcagttcggcagggacatcgccgacaccaccgacgccgtgagggacccccagaccctggagatcctggacatcaccccctgcagcttcggcggcgtgagcgtgatcacccccggcaccaacaccagcaaccaggtggccgtgctgtaccaggacgtgaactgcaccgaggtgcccgtggccatccacgccgaccagctgacccccacctggagggtgtacagcaccggcagcaacgtgttccagaccagggccggctgcctgatcggcgccgagcacgtgaacaacagctacgagtgcgacatccccatcggcgccggcatctgcgccagctaccagacccagaccaacagccccggcagcgccagcagcgtggccagccagagcatcatcgcctacaccatgagcctgggcgccgagaacagcgtggcctacagcaacaacagcatcgccatccccaccaacttcaccatcagcgtgaccaccgagatcctgcccgtgagcatgaccaagaccagcgtggactgcaccatgtacatctgcggcgacagcaccgagtgcagcaacctgctgctgcagtacggcagcttctgcacccagctgaacagggccctgaccggcatcgccgtggagcaggacaagaacacccaggaggtgttcgcccaggtgaagcagatctacaagaccccccccatcaaggacttcggcggcttcaacttcagccagatcctgcccgaccccagcaagcccagcaagaggagccccatcgaggacctgctgttcaacaaggtgaccctggccgacgccggcttcatcaagcagtacggcgactgcctgggcgacatcgccgccagggacctgatctgcgcccagaagttcaacggcctgaccgtgctgccccccctgctgaccgacgagatgatcgcccagtacaccagcgccctgctggccggcaccatcaccagcggctggaccttcggcgccggccccgccctgcagatccccttccccatgcagatggcctacaggttcaacggcatcggcgtgacccagaacgtgctgtacgagaaccagaagctgatcgccaaccagttcaacagcgccatcggcaagatccaggacagcctgagcagcacccccagcgccctgggcaagctgcaggacgtggtgaaccagaacgcccaggccctgaacaccctggtgaagcagctgagcagcaacttcggcgccatcagcagcgtgctgaacgacatcctgagcaggctggacccccccgaggccgaggtgcagatcgacaggctgatcaccggcaggctgcagagcctgcagacctacgtgacccagcagctgatcagggccgccgagatcagggccagcgccaacctggccgccaccaagatgagcgagtgcgtgctgggccagagcaagagggtggacttctgcggcaagggctaccacctgatgagcttcccccagagcgccccccacggcgtggtgttcctgcacgtgacctacgtgcccgcccaggagaagaacttcaccaccgcccccgccatctgccacgacggcaaggcccacttccccagggagggcgtgttcgtgagcaacggcacccactggttcgtgacccagaggaacttctacgagccccagatcatcaccaccgacaacaccttcgtgagcggcaactgcgacgtggtgatcggcatcgtgaacaacaccgtgtacgaccccctgcagcccgagctggacagcttcaaggaggagctggacaagtacttcaagaaccacaccagccccgacgtggacctgggcgacatcagcggcatcaacgccagcgtggtgaacatccagaaggagatcgacaggctgaacgaggtggccaagaacctgaacgagagcctgatcgacctgcaggagctgggcaagtacgagcagtacatcaagtggccctggtacatctggctgggcttcatcgccggcctgatcgccatcgtgatggtgaccatcatgctgtgctgcatgaccagctgctgcagctgcctgaagggctgctgcagctgcggcagctgctgcaagttcgacgaggacgacagcgagcccgtgctgaagggcgtgaagctgcactacaccggaagcggagccacgaacttctctctgttaaagcaagcaggagatgttgaagaaaaccccgggcctgccgagaacgtgaccggcctgttcaaggactgcagcaaggtgatcaccggcctgcaccccacccaggcccccacccacctgagcgtggacaccaagttcaagaccgagggcctgtgcgtggacatccccggcatccccaaggacatgacctacaggaggctgatcagcatgatgggcttcaagatgaactaccaggtgaacggctaccccaacatgttcatcaccagggaggaggccatcaggcacgtgagggcctggatcggcttcgacgtggagggctgccacgccaccagggaggccgtgggcaccaacctgcccctgcagctgggcttcagcaccggcgtgaacctggtggccgtgcccaccggctacgtggacacccccaacaacaccgacttcagcagggtgagcgccaagcccccccccggcgaccagttcaagcacctgatccccctgatgtacaagggcctgccctggaacgtggtgaggatcaagatcgtgcagatgctgagcgacaccctgaagaacctgagcgacagggtggtgttcgtgctgtgggcccacggcttcgagctgaccagcatgaagtacttcgtgaagatcggccccgagaggacctgctgcctgtgcgacaggagggccacctgcttcagcaccgccagcgacacctacgcctgctggcaccacagcatcggcttcgactacgtgtacaaccccttcatgatcgacgtgcagcagtggggcttcaccggcaacctgcagagcaaccacgacctgtactgccaggtgcacggcaacgcccacgtggccagctgcgacgccatcatgaccaggtgcctggccgtgcacgagtgcttcgtgaagagggtggactggaccatcgagtaccccatcatcggcgacgagctgaagatcaacgccgcctgcaggaaggtgcagcacatggtggtgaaggccgccctgctggccgacaagttccccgtgctgcacgacatcggcaaccccaaggccatcaagtgcgtgccccaggccgacgtggagtggaagttctacgacgcccagccctgcagcgacaaggcctacaagatcgaggagctgttctacagctacgccacccacagcgacaagttcaccgacggcgtgtgcctgttctggaactgcaacgtggacaggtaccccgccaacagcatcgtgtgcaggttcgacaccagggtgctgagcaacctgaacctgcccggctgcgacggcggcagcctgtacgtgaacaagcacgccttccacacccccgccttcgacaagagcgccttcgtgaacctgaagcagctgcccttcttctactacagcgacagcccctgcgagagccacggcaagcaggtggtgagcgacatcgactacgtgcccctgaagagcgccacctgcatcaccaggtgcaacctgggcggcgccgtgtgcaggcaccacgccaacgagtacaggctgtacctggacgcctacaacatgatgatcagcgccggcttcagcctgtgggtgtacaagcagttcgacacctacaacctgtggaacaccttcaccaggctgcagggaagcggagagggcaggggaagtcttctaacatgcggggacgtggaggaaaatcccggccccagcctggagaacgtggccttcaacgtggtgaacaagggccacttcgacggccagcagggcgaggtgcccgtgagcatcatcaacaacaccgtgtacaccaaggtggacggcgtggacgtggagctgttcgagaacaagaccaccctgcccgtgaacgtggccttcgagctgtgggccaagaggaacatcaagcccgtgcccgaggtgaagatcctgaacaacctgggcgtggacatcgccgccaacaccgtgatctgggactacaagagggacgcccccgcccacatcagcaccatcggcgtgtgcagcatgaccgacatcgccaagaagcccaccgagaccatctgcgcccccctgaccgtgttcttcgacggcagggtggacggccaggtggacctgttcaggaacgccaggaacggcgtgctgatcaccgagggcagcgtgaagggcctgcagcccagcgtgggccccaagcaggccagcctgaacggcgtgaccctgatcggcgaggccgtgaagacccagttcaactactacaagaaggtggacggcgtggtgcagcagctgcccgagacctacttcacccagagcaggaacctgcaggagttcaagcccaggagccagatggagatcgacttcctggagctggccatggacgagttcatcgagaggtacaagctggagggctacgccttcgagcacatcgtgtacggcgacttcagccacagccagctgggcggcctgcacctgctgatcggcctggccaagaggttcaaggagagccccttcgagctggaggacttcatccccatggacagcaccgtgaagaactacttcatcaccgacgcccagaccggcagcagcaagtgcgtgtgcagcgtgatcgacctgctgctggacgacttcgtggagatcatcaagagccaggacctgagcgtggtgagcaaggtggtgaaggtgaccatcgactacaccgagatcagcttcatgctgtggtgcaaggacggccacgtggagaccttctaccccaagctgcagtgatga

SEQ ID NO: 315 - RNA, 4785 nt, synthetic construct
  source 1..4785: mol_type = other RNA; note = Synthesized Vaccine Candidate 30
atgttcgtgttcctggtgctgctgcccctggtgagcagccagtgcgtgaacctgaccaccaggacccagctgccccccgcctacaccaacagcttcaccaggggcgtgtactaccccgacaaggtgttcaggagcagcgtgctgcacagcacccaggacctgttcctgcccttcttcagcaacgtgacctggttccacgccatccacgtgagcggcaccaacggcaccaagaggttcgacaaccccgtgctgcccttcaacgacggcgtgtacttcgccagcaccgagaagagcaacatcatcaggggctggatcttcggcaccaccctggacagcaagacccagagcctgctgatcgtgaacaacgccaccaacgtggtgatcaaggtgtgcgagttccagttctgcaacgaccccttcctgggcgtgtactaccacaagaacaacaagagctggatggagagcgagttcagggtgtacagcagcgccaacaactgcaccttcgagtacgtgagccagcccttcctgatggacctggagggcaagcagggcaacttcaagaacctgagggagttcgtgttcaagaacatcgacggctacttcaagatctacagcaagcacacccccatcaacctggtgagggacctgccccagggcttcagcgccctggagcccctggtggacctgcccatcggcatcaacatcaccaggttccagaccctgctggccctgcacaggagctacctgacccccggcgacagcagcagcggctggaccgccggcgccgccgcctactacgtgggctacctgcagcccaggaccttcctgctgaagtacaacgagaacggcaccatcaccgacgccgtggactgcgccctggaccccctgagcgagaccaagtgcaccctgaagagcttcaccgtggagaagggcatctaccagaccagcaacttcagggtgcagcccaccgagagcatcgtgaggttccccaacatcaccaacctgtgccccttcggcgaggtgttcaacgccaccaggttcgccagcgtgtacgcctggaacaggaagaggatcagcaactgcgtggccgactacagcgtgctgtacaacagcgccagcttcagcaccttcaagtgctacggcgtgagccccaccaagctgaacgacctgtgcttcaccaacgtgtacgccgacagcttcgtgatcaggggcgacgaggtgaggcagatcgcccccggccagaccggcaagatcgccgactacaactacaagctgcccgacgacttcaccggctgcgtgatcgcctggaacagcaacaacctggacagcaaggtgggcggcaactacaactacctgtacaggctgttcaggaagagcaacctgaagcccttcgagagggacatcagcaccgagatctaccaggccggcagcaccccctgcaacggcgtggagggcttcaactgctacttccccctgcagagctacggcttccagcccaccaacggcgtgggctaccagccctacagggtggtggtgctgagcttcgagctgctgcacgcccccgccaccgtgtgcggccccaagaagagcaccaacctggtgaagaacaagtgcgtgaacttcaacttcaacggcctgaccggcaccggcgtgctgaccgagagcaacaagaagttcctgcccttccagcagttcggcagggacatcgccgacaccaccgacgccgtgagggacccccagaccctggagatcctggacatcaccccctgcagcttcggcggcgtgagcgtgatcacccccggcaccaacaccagcaaccaggtggccgtgctgtaccaggacgtgaactgcaccgaggtgcccgtggccatccacgccgaccagctgacccccacctggagggtgtacagcaccggcagcaacgtgttccagaccagggccggctgcctgatcggcgccgagcacgtgaacaacagctacgagtgcgacatccccatcggcgccggcatctgcgccagctaccagacccagaccaacagccccaggagggccaggagcgtggccagccagagcatcatcgcctacaccatgagcctgggcgccgagaacagcgtggcctacagcaacaacagcatcgccatccccaccaacttcaccatcagcgtgaccaccgagatcctgcccgtgagcatgaccaagaccagcgtggactgcaccatgtacatctgcggcgacagcaccgagtgcagcaacctgctgctgcagtacggcagcttctgcacccagctgaacagggccctgaccggcatcgccgtggagcaggacaagaacacccaggaggtgttcgcccaggtgaagcagatctacaagaccccccccatcaaggacttcggcggcttcaacttcagccagatcctgcccgaccccagcaagcccagcaagaggagcttcatcgaggacctgctgttcaacaaggtgaccctggccgacgccggcttcatcaagcagtacggcgactgcctgggcgacatcgccgccagggacctgatctgcgcccagaagttcaacggcctgaccgtgctgccccccctgctgaccgacgagatgatcgcccagtacaccagcgccctgctggccggcaccatcaccagcggctggaccttcggcgccggcgccgccctgcagatccccttcgccatgcagatggcctacaggttcaacggcatcggcgtgacccagaacgtgctgtacgagaaccagaagctgatcgccaaccagttcaacagcgccatcggcaagatccaggacagcctgagcagcaccgccagcgccctgggcaagctgcaggacgtggtgaaccagaacgcccaggccctgaacaccctggtgaagcagctgagcagcaacttcggcgccatcagcagcgtgctgaacgacatcctgagcaggctggacccccccgaggccgaggtgcagatcgacaggctgatcaccggcaggctgcagagcctgcagacctacgtgacccagcagctgatcagggccgccgagatcagggccagcgccaacctggccgccaccaagatgagcgagtgcgtgctgggccagagcaagagggtggacttctgcggcaagggctaccacctgatgagcttcccccagagcgccccccacggcgtggtgttcctgcacgtgacctacgtgcccgcccaggagaagaacttcaccaccgcccccgccatctgccacgacggcaaggcccacttccccagggagggcgtgttcgtgagcaacggcacccactggttcgtgacccagaggaacttctacgagccccagatcatcaccaccgacaacaccttcgtgagcggcaactgcgacgtggtgatcggcatcgtgaacaacaccgtgtacgaccccctgcagcccgagctggacagcttcaaggaggagctggacaagtacttcaagaaccacaccagccccgacgtggacctgggcgacatcagcggcatcaacgccagcgtggtgaacatccagaaggagatcgacaggctgaacgaggtggccaagaacctgaacgagagcctgatcgacctgcaggagctgggcaagtacgagcagtacatcaagtggccctggtacatctggctgggcttcatcgccggcctgatcgccatcgtgatggtgaccatcatgctgtgctgcatgaccagctgctgcagctgcctgaagggctgctgcagctgcggcagctgctgcaagttcgacgaggacgacagcgagcccgtgctgaagggcgtgaagctgcactacaccggaagcggagccacgaacttctctctgttaaagcaagcaggagatgttgaagaaaaccccgggcctagcagccaggcctggcagcccggcgtggccatgcccaacctgtacaagatgcagaggatgctgctggagaagtgcgacctgcagaactacggcgacagcgccaccctgcccaagggcatcatgatgaacgtggccaagtacacccagctgtgccagtacctgaacaccctgaccctggccgtgccctacaacatgagggtgatccacttcggcgccggcagcgacaagggcgtggcccccggcaccgccgtgctgaggcagtggctgcccaccggcaccctgctggtggacagcgacctgaacgacttcgtgagcgacgccgacagcaccctgatcggcgactgcgccaccgtgcacaccgccaacaagtgggacctgatcatcagcgacatgtacgaccccaagaccaagaacgtgaccaaggagaacgacagcaaggagggcttcttcacctacatctgcggcttcatccagcagaagctggccctgggcggcagcgtggccatcaagatcaccgagcacagctggaacgccgacctgtacaagctgatgggccacttcgcctggtggaccgccttcgtgaccaacgtgaacgccagcagcagcgaggccttcctgatcggctgcaactacctgggcaagcccagggagcagatcgacggctacgtgatgcacgccaactacatcttctggaggaacaccaaccccatccagctgagcagctacagcctgttcgacatgagcaagttccccctgaagctgaggggcaccgccgtgatgagcctgaaggagggccagatcaacgacatgatcctgagcctgctgagcaagggcaggctgatcatcagggagaacaacagggtggtgatcagcagcgacgtgctggtgaacaactgatga

SEQ ID NO: 316 - RNA, 4785 nt, synthetic construct
  source 1..4785: mol_type = other RNA; note = Synthesized Vaccine Candidate 31
atgttcgtgttcctggtgctgctgcccctggtgagcagccagtgcgtgaacctgaccaccaggacccagctgccccccgcctacaccaacagcttcaccaggggcgtgtactaccccgacaaggtgttcaggagcagcgtgctgcacagcacccaggacctgttcctgcccttcttcagcaacgtgacctggttccacgccatccacgtgagcggcaccaacggcaccaagaggttcgacaaccccgtgctgcccttcaacgacggcgtgtacttcgccagcaccgagaagagcaacatcatcaggggctggatcttcggcaccaccctggacagcaagacccagagcctgctgatcgtgaacaacgccaccaacgtggtgatcaaggtgtgcgagttccagttctgcaacgaccccttcctgggcgtgtactaccacaagaacaacaagagctggatggagagcgagttcagggtgtacagcagcgccaacaactgcaccttcgagtacgtgagccagcccttcctgatggacctggagggcaagcagggcaacttcaagaacctgagggagttcgtgttcaagaacatcgacggctacttcaagatctacagcaagcacacccccatcaacctggtgagggacctgccccagggcttcagcgccctggagcccctggtggacctgcccatcggcatcaacatcaccaggttccagaccctgctggccctgcacaggagctacctgacccccggcgacagcagcagcggctggaccgccggcgccgccgcctactacgtgggctacctgcagcccaggaccttcctgctgaagtacaacgagaacggcaccatcaccgacgccgtggactgcgccctggaccccctgagcgagaccaagtgcaccctgaagagcttcaccgtggagaagggcatctaccagaccagcaacttcagggtgcagcccaccgagagcatcgtgaggttccccaacatcaccaacctgtgccccttcggcgaggtgttcaacgccaccaggttcgccagcgtgtacgcctggaacaggaagaggatcagcaactgcgtggccgactacagcgtgctgtacaacagcgccagcttcagcaccttcaagtgctacggcgtgagccccaccaagctgaacgacctgtgcttcaccaacgtgtacgccgacagcttcgtgatcaggggcgacgaggtgaggcagatcgcccccggccagaccggcaagatcgccgactacaactacaagctgcccgacgacttcaccggctgcgtgatcgcctggaacagcaacaacctggacagcaaggtgggcggcaactacaactacctgtacaggctgttcaggaagagcaacctgaagcccttcgagagggacatcagcaccgagatctaccaggccggcagcaccccctgcaacggcgtggagggcttcaactgctacttccccctgcagagctacggcttccagcccaccaacggcgtgggctaccagccctacagggtggtggtgctgagcttcgagctgctgcacgcccccgccaccgtgtgcggccccaagaagagcaccaacctggtgaagaacaagtgcgtgaacttcaacttcaacggcctgaccggcaccggcgtgctgaccgagagcaacaagaagttcctgcccttccagcagttcggcagggacatcgccgacaccaccgacgccgtgagggacccccagaccctggagatcctggacatcaccccctgcagcttcggcggcgtgagcgtgatcacccccggcaccaacaccagcaaccaggtggccgtgctgtaccaggacgtgaactgcaccgaggtgcccgtggccatccacgccgaccagctgacccccacctggagggtgtacagcaccggcagcaacgtgttccagaccagggccggctgcctgatcggcgccgagcacgtgaacaacagctacgagtgcgacatccccatcggcgccggcatctgcgccagctaccagacccagaccaacagccccggcagcgccagcagcgtggccagccagagcatcatcgcctacaccatgagcctgggcgccgagaacagcgtggcctacagcaacaacagcatcgccatccccaccaacttcaccatcagcgtgaccaccgagatcctgcccgtgagcatgaccaagaccagcgtggactgcaccatgtacatctgcggcgacagcaccgagtgcagcaacctgctgctgcagtacggcagcttctgcacccagctgaacagggccctgaccggcatcgccgtggagcaggacaagaacacccaggaggtgttcgcccaggtgaagcagatctacaagaccccccccatcaaggacttcggcggcttcaacttcagccagatcctgcccgaccccagcaagcccagcaagaggagccccatcgaggacctgctgttcaacaaggtgaccctggccgacgccggcttcatcaagcagtacggcgactgcctgggcgacatcgccgccagggacctgatctgcgcccagaagttcaacggcctgaccgtgctgccccccctgctgaccgacgagatgatcgcccagtacaccagcgccctgctggccggcaccatcaccagcggctggaccttcggcgccggccccgccctgcagatccccttccccatgcagatggcctacaggttcaacggcatcggcgtgacccagaacgtgctgtacgagaaccagaagctgatcgccaaccagttcaacagcgccatcggcaagatccaggacagcctgagcagcacccccagcgccctgggcaagctgcaggacgtggtgaaccagaacgcccaggccctgaacaccctggtgaagcagctgagcagcaacttcggcgccatcagcagcgtgctgaacgacatcctgagcaggctggacccccccgaggccgaggtgcagatcgacaggctgatcaccggcaggctgcagagcctgcagacctacgtgacccagcagctgatcagggccgccgagatcagggccagcgccaacctggccgccaccaagatgagcgagtgcgtgctgggccagagcaagagggtggacttctgcggcaagggctaccacctgatgagcttcccccagagcgccccccacggcgtggtgttcctgcacgtgacctacgtgcccgcccaggagaagaacttcaccaccgcccccgccatctgccacgacggcaaggcccacttccccagggagggcgtgttcgtgagcaacggcacccactggttcgtgacccagaggaacttctacgagccccagatcatcaccaccgacaacaccttcgtgagcggcaactgcgacgtggtgatcggcatcgtgaacaacaccgtgtacgaccccctgcagcccgagctggacagcttcaaggaggagctggacaagtacttcaagaaccacaccagccccgacgtggacctgggcgacatcagcggcatcaacgccagcgtggtgaacatccagaaggagatcgacaggctgaacgaggtggccaagaacctgaacgagagcctgatcgacctgcaggagctgggcaagtacgagcagtacatcaagtggccctggtacatctggctgggcttcatcgccggcctgatcgccatcgtgatggtgaccatcatgctgtgctgcatgaccagctgctgcagctgcctgaagggctgctgcagctgcggcagctgctgcaagttcgacgaggacgacagcgagcccgtgctgaagggcgtgaagctgcactacaccggaagcggagccacgaacttctctctgttaaagcaagcaggagatgttgaagaaaaccccgggcctagcagccaggcctggcagcccggcgtggccatgcccaacctgtacaagatgcagaggatgctgctggagaagtgcgacctgcagaactacggcgacagcgccaccctgcccaagggcatcatgatgaacgtggccaagtacacccagctgtgccagtacctgaacaccctgaccctggccgtgccctacaacatgagggtgatccacttcggcgccggcagcgacaagggcgtggcccccggcaccgccgtgctgaggcagtggctgcccaccggcaccctgctggtggacagcgacctgaacgacttcgtgagcgacgccgacagcaccctgatcggcgactgcgccaccgtgcacaccgccaacaagtgggacctgatcatcagcgacatgtacgaccccaagaccaagaacgtgaccaaggagaacgacagcaaggagggcttcttcacctacatctgcggcttcatccagcagaagctggccctgggcggcagcgtggccatcaagatcaccgagcacagctggaacgccgacctgtacaagctgatgggccacttcgcctggtggaccgccttcgtgaccaacgtgaacgccagcagcagcgaggccttcctgatcggctgcaactacctgggcaagcccagggagcagatcgacggctacgtgatgcacgccaactacatcttctggaggaacaccaaccccatccagctgagcagctacagcctgttcgacatgagcaagttccccctgaagctgaggggcaccgccgtgatgagcctgaaggagggccagatcaacgacatgatcctgagcctgctgagcaagggcaggctgatcatcagggagaacaacagggtggtgatcagcagcgacgtgctggtgaacaactgatga

SEQ ID NO: 317 - RNA, 4716 nt, synthetic construct
  source 1..4716: mol_type = other RNA; note = Synthesized Vaccine Candidate 32
atgttcgtgttcctggtgctgctgcccctggtgagcagccagtgcgtgaacctgaccaccaggacccagctgccccccgcctacaccaacagcttcaccaggggcgtgtactaccccgacaaggtgttcaggagcagcgtgctgcacagcacccaggacctgttcctgcccttcttcagcaacgtgacctggttccacgccatccacgtgagcggcaccaacggcaccaagaggttcgacaaccccgtgctgcccttcaacgacggcgtgtacttcgccagcaccgagaagagcaacatcatcaggggctggatcttcggcaccaccctggacagcaagacccagagcctgctgatcgtgaacaacgccaccaacgtggtgatcaaggtgtgcgagttccagttctgcaacgaccccttcctgggcgtgtactaccacaagaacaacaagagctggatggagagcgagttcagggtgtacagcagcgccaacaactgcaccttcgagtacgtgagccagcccttcctgatggacctggagggcaagcagggcaacttcaagaacctgagggagttcgtgttcaagaacatcgacggctacttcaagatctacagcaagcacacccccatcaacctggtgagggacctgccccagggcttcagcgccctggagcccctggtggacctgcccatcggcatcaacatcaccaggttccagaccctgctggccctgcacaggagctacctgacccccggcgacagcagcagcggctggaccgccggcgccgccgcctactacgtgggctacctgcagcccaggaccttcctgctgaagtacaacgagaacggcaccatcaccgacgccgtggactgcgccctggaccccctgagcgagaccaagtgcaccctgaagagcttcaccgtggagaagggcatctaccagaccagcaacttcagggtgcagcccaccgagagcatcgtgaggttccccaacatcaccaacctgtgccccttcggcgaggtgttcaacgccaccaggttcgccagcgtgtacgcctggaacaggaagaggatcagcaactgcgtggccgactacagcgtgctgtacaacagcgccagcttcagcaccttcaagtgctacggcgtgagccccaccaagctgaacgacctgtgcttcaccaacgtgtacgccgacagcttcgtgatcaggggcgacgaggtgaggcagatcgcccccggccagaccggcaagatcgccgactacaactacaagctgcccgacgacttcaccggctgcgtgatcgcctggaacagcaacaacctggacagcaaggtgggcggcaactacaactacctgtacaggctgttcaggaagagcaacctgaagcccttcgagagggacatcagcaccgagatctaccaggccggcagcaccccctgcaacggcgtggagggcttcaactgctacttccccctgcagagctacggcttccagcccaccaacggcgtgggctaccagccctacagggtggtggtgctgagcttcgagctgctgcacgcccccgccaccgtgtgcggccccaagaagagcaccaacctggtgaagaacaagtgcgtgaacttcaacttcaacggcctgaccggcaccggcgtgctgaccgagagcaacaagaagttcctgcccttccagcagttcggcagggacatcgccgacaccaccgacgccgtgagggacccccagaccctggagatcctggacatcaccccctgcagcttcggcggcgtgagcgtgatcacccccggcaccaacaccagcaaccaggtggccgtgctgtaccaggacgtgaactgcaccgaggtgcccgtggccatccacgccgaccagctgacccccacctggagggtgtacagcaccggcagcaacgtgttccagaccagggccggctgcctgatcggcgccgagcacgtgaacaacagctacgagtgcgacatccccatcggcgccggcatctgcgccagctaccagacccagaccaacagccccaggagggccaggagcgtggccagccagagcatcatcgcctacaccatgagcctgggcgccgagaacagcgtggcctacagcaacaacagcatcgccatccccaccaacttcaccatcagcgtgaccaccgagatcctgcccgtgagcatgaccaagaccagcgtggactgcaccatgtacatctgcggcgacagcaccgagtgcagcaacctgctgctgcagtacggcagcttctgcacccagctgaacagggccctgaccggcatcgccgtggagcaggacaagaacacccaggaggtgttcgcccaggtgaagcagatctacaagaccccccccatcaaggacttcggcggcttcaacttcagccagatcctgcccgaccccagcaagcccagcaagaggagcttcatcgaggacctgctgttcaacaaggtgaccctggccgacgccggcttcatcaagcagtacggcgactgcctgggcgacatcgccgccagggacctgatctgcgcccagaagttcaacggcctgaccgtgctgccccccctgctgaccgacgagatgatcgcccagtacaccagcgccctgctggccggcaccatcaccagcggctggaccttcggcgccggcgccgccctgcagatccccttcgccatgcagatggcctacaggttcaacggcatcggcgtgacccagaacgtgctgtacgagaaccagaagctgatcgccaaccagttcaacagcgccatcggcaagatccaggacagcctgagcagcaccgccagcgccctgggcaagctgcaggacgtggtgaaccagaacgcccaggccctgaacaccctggtgaagcagctgagcagcaacttcggcgccatcagcagcgtgctgaacgacatcctgagcaggctggacccccccgaggccgaggtgcagatcgacaggctgatcaccggcaggctgcagagcctgcagacctacgtgacccagcagctgatcagggccgccgagatcagggccagcgccaacctggccgccaccaagatgagcgagtgcgtgctgggccagagcaagagggtggacttctgcggcaagggctaccacctgatgagcttcccccagagcgccccccacggcgtggtgttcctgcacgtgacctacgtgcccgcccaggagaagaacttcaccaccgcccccgccatctgccacgacggcaaggcccacttccccagggagggcgtgttcgtgagcaacggcacccactggttcgtgacccagaggaacttctacgagccccagatcatcaccaccgacaacaccttcgtgagcggcaactgcgacgtggtgatcggcatcgtgaacaacaccgtgtacgaccccctgcagcccgagctggacagcttcaaggaggagctggacaagtacttcaagaaccacaccagccccgacgtggacctgggcgacatcagcggcatcaacgccagcgtggtgaacatccagaaggagatcgacaggctgaacgaggtggccaagaacctgaacgagagcctgatcgacctgcaggagctgggcaagtacgagcagtacatcaagtggccctggtacatctggctgggcttcatcgccggcctgatcgccatcgtgatggtgaccatcatgctgtgctgcatgaccagctgctgcagctgcctgaagggctgctgcagctgcggcagctgctgcaagttcgacgaggacgacagcgagcccgtgctgaagggcgtgaagctgcactacaccggaagcggagccacgaacttctctctgttaaagcaagcaggagatgttgaagaaaaccccgggcctatggacctgttcatgaggatcttcaccatcggcaccgtgaccctgaagcagggcgagatcaaggacgccacccccagcgacttcgtgagggccaccgccaccatccccatccaggccagcctgcccttcggctggctgatcgtgggcgtggccctgctggccgtgttccagagcgccagcaagatcatcaccctgaagaagaggtggcagctggccctgagcaagggcgtgcacttcgtgtgcaacctgctgctgctgttcgtgaccgtgtacagccacctgctgctggtggccgccggcctggaggcccccttcctgtacctgtacgccctggtgtacttcctgcagagcatcaacttcgtgaggatcatcatgaggctgtggctgtgctggaagtgcaggagcaagaaccccctgctgtacgacgccaactacttcctgtgctggcacaccaactgctacgactactgcatcccctacaacagcgtgaccagcagcatcgtgatcaccagcggcgacggcaccaccagccccatcagcgagcacgactaccagatcggcggctacaccgagaagtgggagagcggcgtgaaggactgcgtggtgctgcacagctacttcaccagcgactactaccagctgtacagcacccagctgagcaccgacaccggcgtggagcacgtgaccttcttcatctacaacaagatcgtggacgagcccgaggagcacgtgcagatccacaccatcgacggcagcagcggcgtggtgaaccccgtgatggagcccatctacgacgagcccaccaccaccaccagcgtgcccctgtgatga

SEQ ID NO: 318 - RNA, 4716 nt, synthetic construct
  source 1..4716: mol_type = other RNA; note = Synthesized Vaccine Candidate 33
atgttcgtgttcctggtgctgctgcccctggtgagcagccagtgcgtgaacctgaccaccaggacccagctgccccccgcctacaccaacagcttcaccaggggcgtgtactaccccgacaaggtgttcaggagcagcgtgctgcacagcacccaggacctgttcctgcccttcttcagcaacgtgacctggttccacgccatccacgtgagcggcaccaacggcaccaagaggttcgacaaccccgtgctgcccttcaacgacggcgtgtacttcgccagcaccgagaagagcaacatcatcaggggctggatcttcggcaccaccctggacagcaagacccagagcctgctgatcgtgaacaacgccaccaacgtggtgatcaaggtgtgcgagttccagttctgcaacgaccccttcctgggcgtgtactaccacaagaacaacaagagctggatggagagcgagttcagggtgtacagcagcgccaacaactgcaccttcgagtacgtgagccagcccttcctgatggacctggagggcaagcagggcaacttcaagaacctgagggagttcgtgttcaagaacatcgacggctacttcaagatctacagcaagcacacccccatcaacctggtgagggacctgccccagggcttcagcgccctggagcccctggtggacctgcccatcggcatcaacatcaccaggttccagaccctgctggccctgcacaggagctacctgacccccggcgacagcagcagcggctggaccgccggcgccgccgcctactacgtgggctacctgcagcccaggaccttcctgctgaagtacaacgagaacggcaccatcaccgacgccgtggactgcgccctggaccccctgagcgagaccaagtgcaccctgaagagcttcaccgtggagaagggcatctaccagaccagcaacttcagggtgcagcccaccgagagcatcgtgaggttccccaacatcaccaacctgtgccccttcggcgaggtgttcaacgccaccaggttcgccagcgtgtacgcctggaacaggaagaggatcagcaactgcgtggccgactacagcgtgctgtacaacagcgccagcttcagcaccttcaagtgctacggcgtgagccccaccaagctgaacgacctgtgcttcaccaacgtgtacgccgacagcttcgtgatcaggggcgacgaggtgaggcagatcgcccccggccagaccggcaagatcgccgactacaactacaagctgcccgacgacttcaccggctgcgtgatcgcctggaacagcaacaacctggacagcaaggtgggcggcaactacaactacctgtacaggctgttcaggaagagcaacctgaagcccttcgagagggacatcagcaccgagatctaccaggccggcagcaccccctgcaacggcgtggagggcttcaactgctacttccccctgcagagctacggcttccagcccaccaacggcgtgggctaccagccctacagggtggtggtgctgagcttcgagctgctgcacgcccccgccaccgtgtgcggccccaagaagagcaccaacctggtgaagaacaagtgcgtgaacttcaacttcaacggcctgaccggcaccggcgtgctgaccgagagcaacaagaagttcctgcccttccagcagttcggcagggacatcgccgacaccaccgacgccgtgagggacccccagaccctggagatcctggacatcaccccctgcagcttcggcggcgtgagcgtgatcacccccggcaccaacaccagcaaccaggtggccgtgctgtaccaggacgtgaactgcaccgaggtgcccgtggccatccacgccgaccagctgacccccacctggagggtgtacagcaccggcagcaacgtgttccagaccagggccggctgcctgatcggcgccgagcacgtgaacaacagctacgagtgcgacatccccatcggcgccggcatctgcgccagctaccagacccagaccaacagccccggcagcgccagcagcgtggccagccagagcatcatcgcctacaccatgagcctgggcgccgagaacagcgtggcctacagcaacaacagcatcgccatccccaccaacttcaccatcagcgtgaccaccgagatcctgcccgtgagcatgaccaagaccagcgtggactgcaccatgtacatctgcggcgacagcaccgagtgcagcaacctgctgctgcagtacggcagcttctgcacccagctgaacagggccctgaccggcatcgccgtggagcaggacaagaacacccaggaggtgttcgcccaggtgaagcagatctacaagaccccccccatcaaggacttcggcggcttcaacttcagccagatcctgcccgaccccagcaagcccagcaagaggagccccatcgaggacctgctgttcaacaaggtgaccctggccgacgccggcttcatcaagcagtacggcgactgcctgggcgacatcgccgccagggacctgatctgcgcccagaagttcaacggcctgaccgtgctgccccccctgctgaccgacgagatgatcgcccagtacaccagcgccctgctggccggcaccatcaccagcggctggaccttcggcgccggccccgccctgcagatccccttccccatgcagatggcctacaggttcaacggcatcggcgtgacccagaacgtgctgtacgagaaccagaagctgatcgccaaccagttcaacagcgccatcggcaagatccaggacagcctgagcagcacccccagcgccctgggcaagctgcaggacgtggtgaaccagaacgcccaggccctgaacaccctggtgaagcagctgagcagcaacttcggcgccatcagcagcgtgctgaacgacatcctgagcaggctggacccccccgaggccgaggtgcagatcgacaggctgatcaccggcaggctgcagagcctgcagacctacgtgacccagcagctgatcagggccgccgagatcagggccagcgccaacctggccgccaccaagatgagcgagtgcgtgctgggccagagcaagagggtggacttctgcggcaagggctaccacctgatgagcttcccccagagcgccccccacggcgtggtgttcctgcacgtgacctacgtgcccgcccaggagaagaacttcaccaccgcccccgccatctgccacgacggcaaggcccacttccccagggagggcgtgttcgtgagcaacggcacccactggttcgtgacccagaggaacttctacgagccccagatcatcaccaccgacaacaccttcgtgagcggcaactgcgacgtggtgatcggcatcgtgaacaacaccgtgtacgaccccctgcagcccgagctggacagcttcaaggaggagctggacaagtacttcaagaaccacaccagccccgacgtggacctgggcgacatcagcggcatcaacgccagcgtggtgaacatccagaaggagatcgacaggctgaacgaggtggccaagaacctgaacgagagcctgatcgacctgcaggagctgggcaagtacgagcagtacatcaagtggccctggtacatctggctgggcttcatcgccggcctgatcgccatcgtgatggtgaccatcatgctgtgctgcatgaccagctgctgcagctgcctgaagggctgctgcagctgcggcagctgctgcaagttcgacgaggacgacagcgagcccgtgctgaagggcgtgaagctgcactacaccggaagcggagccacgaacttctctctgttaaagcaagcaggagatgttgaagaaaaccccgggcctatggacctgttcatgaggatcttcaccatcggcaccgtgaccctgaagcagggcgagatcaaggacgccacccccagcgacttcgtgagggccaccgccaccatccccatccaggccagcctgcccttcggctggctgatcgtgggcgtggccctgctggccgtgttccagagcgccagcaagatcatcaccctgaagaagaggtggcagctggccctgagcaagggcgtgcacttcgtgtgcaacctgctgctgctgttcgtgaccgtgtacagccacctgctgctggtggccgccggcctggaggcccccttcctgtacctgtacgccctggtgtacttcctgcagagcatcaacttcgtgaggatcatcatgaggctgtggctgtgctggaagtgcaggagcaagaaccccctgctgtacgacgccaactacttcctgtgctggcacaccaactgctacgactactgcatcccctacaacagcgtgaccagcagcatcgtgatcaccagcggcgacggcaccaccagccccatcagcgagcacgactaccagatcggcggctacaccgagaagtgggagagcggcgtgaaggactgcgtggtgctgcacagctacttcaccagcgactactaccagctgtacagcacccagctgagcaccgacaccggcgtggagcacgtgaccttcttcatctacaacaagatcgtggacgagcccgaggagcacgtgcagatccacaccatcgacggcagcagcggcgtggtgaaccccgtgatggagcccatctacgacgagcccaccaccaccaccagcgtgcccctgtgatga

SEQ ID NO: 319 - DNA, 5915 bp, synthetic construct
  source 1..5915: mol_type = other DNA; note = Synthesized Vaccine Candidate 34
ctcgacattgattattgactagttattaatagtaatcaattacggggtcattagttcatagcccatatatggagttccgcgttacataacttacggtaaatggcccgcctggctgaccgcccaacgacccccgcccattgacgtcaataatgacgtatgttcccatagtaacgccaatagggactttccattgacgtcaatgggtggagtatttacggtaaactgcccacttggcagtacatcaagtgtatcatatgccaagtacgccccctattgacgtcaatgacggtaaatggcccgcctggcattatgcccagtacatgaccttatgggactttcctacttggcagtacatctacgtattagtcatcgctattaccatggtcgaggtgagccccacgttctgcttcactctccccatctcccccccctccccacccccaattttgtatttatttattttttaattattttgtgcagcgatgggggcggggggggggggggggcgcgcgccaggcggggcggggcggggcgaggggcggggcggggcgaggcggagaggtgcggcggcagccaatcagagcggcgcgctccgaaagtttccttttatggcgaggcggcggcggcggcggccctataaaaagcgaagcgcgcggcgggcgggagtcgctgcgcgctgccttcgccccgtgccccgctccgccgccgcctcgcgccgcccgccccggctctgactgaccgcgttactcccacaggtgagcgggcgggacggcccttctcctccgggctgtaattagcgcttggtttaatgacggcttgtttcttttctgtggctgcgtgaaagccttgaggggctccgggagggccctttgtgcggggggagcggctcggggggtgcgtgcgtgtgtgtgtgcgtggggagcgccgcgtgcggctccgcgctgcccggcggctgtgagcgctgcgggcgcggcgcggggctttgtgcgctccgcagtgtgcgcgaggggagcgcggccgggggcggtgccccgcggtgcggggggggctgcgaggggaacaaaggctgcgtgcggggtgtgtgcgtgggggggtgagcagggggtgtgggcgcgtcggtcgggctgcaaccccccctgcacccccctccccgagttgctgagcacggcccggcttcgggtgcggggctccgtacggggcgtggcgcggggctcgccgtgccgggcggggggtggcggcaggtgggggtgccgggcggggcggggccgcctcgggccggggagggctcgggggaggggcgcggcggcccccggagcgccggcggctgtcgaggcgcggcgagccgcagccattgccttttatggtaatcgtgcgagagggcgcagggacttcctttgtcccaaatctgtgcggagccgaaatctgggaggcgccgccgcaccccctctagcgggcgcggggcgaagcggtgcggcgccggcaggaaggaaatgggcggggagggccttcgtgcgtcgccgcgccgccgtccccttctccctctccagcctcggggctgtccgcggggggacggctgccttcgggggggacggggcagggcggggttcggcttctggcgtgtgaccggcggctctagagcctctgctaaccatgttcatgccttcttctttttcctacagctcctgggcaacgtgctggttattgtgctgtctcatcattttggcaaagaattggagaataaactagtattcttctggtccccacagactcagagagaacccgccaccatgttcgtgttcctggtgctgctgcccctggtgagcagccagtgcgtgaacctgaccaccaggacccagctgccccccgcctacaccaacagcttcaccaggggcgtgtactaccccgacaaggtgttcaggagcagcgtgctgcacagcacccaggacctgttcctgcccttcttcagcaacgtgacctggttccacgccatccacgtgagcggcaccaacggcaccaagaggttcgacaaccccgtgctgcccttcaacgacggcgtgtacttcgccagcaccgagaagagcaacatcatcaggggctggatcttcggcaccaccctggacagcaagacccagagcctgctgatcgtgaacaacgccaccaacgtggtgatcaaggtgtgcgagttccagttctgcaacgaccccttcctgggcgtgtactaccacaagaacaacaagagctggatggagagcgagttcagggtgtacagcagcgccaacaactgcaccttcgagtacgtgagccagcccttcctgatggacctggagggcaagcagggcaacttcaagaacctgagggagttcgtgttcaagaacatcgacggctacttcaagatctacagcaagcacacccccatcaacctggtgagggacctgccccagggcttcagcgccctggagcccctggtggacctgcccatcggcatcaacatcaccaggttccagaccctgctggccctgcacaggagctacctgacccccggcgacagcagcagcggctggaccgccggcgccgccgcctactacgtgggctacctgcagcccaggaccttcctgctgaagtacaacgagaacggcaccatcaccgacgccgtggactgcgccctggaccccctgagcgagaccaagtgcaccctgaagagcttcaccgtggagaagggcatctaccagaccagcaacttcagggtgcagcccaccgagagcatcgtgaggttccccaacatcaccaacctgtgccccttcggcgaggtgttcaacgccaccaggttcgccagcgtgtacgcctggaacaggaagaggatcagcaactgcgtggccgactacagcgtgctgtacaacagcgccagcttcagcaccttcaagtgctacggcgtgagccccaccaagctgaacgacctgtgcttcaccaacgtgtacgccgacagcttcgtgatcaggggcgacgaggtgaggcagatcgcccccggccagaccggcaagatcgccgactacaactacaagctgcccgacgacttcaccggctgcgtgatcgcctggaacagcaacaacctggacagcaaggtgggcggcaactacaactacctgtacaggctgttcaggaagagcaacctgaagcccttcgagagggacatcagcaccgagatctaccaggccggcagcaccccctgcaacggcgtggagggcttcaactgctacttccccctgcagagctacggcttccagcccaccaacggcgtgggctaccagccctacagggtggtggtgctgagcttcgagctgctgcacgcccccgccaccgtgtgcggccccaagaagagcaccaacctggtgaagaacaagtgcgtgaacttcaacttcaacggcctgaccggcaccggcgtgctgaccgagagcaacaagaagttcctgcccttccagcagttcggcagggacatcgccgacaccaccgacgccgtgagggacccccagaccctggagatcctggacatcaccccctgcagcttcggcggcgtgagcgtgatcacccccggcaccaacaccagcaaccaggtggccgtgctgtaccaggacgtgaactgcaccgaggtgcccgtggccatccacgccgaccagctgacccccacctggagggtgtacagcaccggcagcaacgtgttccagaccagggccggctgcctgatcggcgccgagcacgtgaacaacagctacgagtgcgacatccccatcggcgccggcatctgcgccagctaccagacccagaccaacagccccggcagcgccagcagcgtggccagccagagcatcatcgcctacaccatgagcctgggcgccgagaacagcgtggcctacagcaacaacagcatcgccatccccaccaacttcaccatcagcgtgaccaccgagatcctgcccgtgagcatgaccaagaccagcgtggactgcaccatgtacatctgcggcgacagcaccgagtgcagcaacctgctgctgcagtacggcagcttctgcacccagctgaacagggccctgaccggcatcgccgtggagcaggacaagaacacccaggaggtgttcgcccaggtgaagcagatctacaagaccccccccatcaaggacttcggcggcttcaacttcagccagatcctgcccgaccccagcaagcccagcaagaggagccccatcgaggacctgctgttcaacaaggtgaccctggccgacgccggcttcatcaagcagtacggcgactgcctgggcgacatcgccgccagggacctgatctgcgcccagaagttcaacggcctgaccgtgctgccccccctgctgaccgacgagatgatcgcccagtacaccagcgccctgctggccggcaccatcaccagcggctggaccttcggcgccggccccgccctgcagatccccttccccatgcagatggcctacaggttcaacggcatcggcgtgacccagaacgtgctgtacgagaaccagaagctgatcgccaaccagttcaacagcgccatcggcaagatccaggacagcctgagcagcacccccagcgccctgggcaagctgcaggacgtggtgaaccagaacgcccaggccctgaacaccctggtgaagcagctgagcagcaacttcggcgccatcagcagcgtgctgaacgacatcctgagcaggctggacccccccgaggccgaggtgcagatcgacaggctgatcaccggcaggctgcagagcctgcagacctacgtgacccagcagctgatcagggccgccgagatcagggccagcgccaacctggccgccaccaagatgagcgagtgcgtgctgggccagagcaagagggtggacttctgcggcaagggctaccacctgatgagcttcccccagagcgccccccacggcgtggtgttcctgcacgtgacctacgtgcccgcccaggagaagaacttcaccaccgcccccgccatctgccacgacggcaaggcccacttccccagggagggcgtgttcgtgagcaacggcacccactggttcgtgacccagaggaacttctacgagccccagatcatcaccaccgacaacaccttcgtgagcggcaactgcgacgtggtgatcggcatcgtgaacaacaccgtgtacgaccccctgcagcccgagctggacagcttcaaggaggagctggacaagtacttcaagaaccacaccagccccgacgtggacctgggcgacatcagcggcatcaacgccagcgtggtgaacatccagaaggagatcgacaggctgaacgaggtggccaagaacctgaacgagagcctgatcgacctgcaggagctgggcaagtacgagcagtacatcaagtggccctggtacatctggctgggcttcatcgccggcctgatcgccatcgtgatggtgaccatcatgctgtgctgcatgaccagctgctgcagctgcctgaagggctgctgcagctgcggcagctgctgcaagttcgacgaggacgacagcgagcccgtgctgaagggcgtgaagctgcactacacctgatgactcgagctggtactgcatgcacgcaatgctagctgcccctttcccgtcctgggtaccccgagtctcccccgacctcgggtcccaggtatgctcccacctccacctgccccactcaccacctctgctagttccagacacctcccaagcacgcagcaatgcagctcaaaacgcttagcctagccacacccccacgggaaacagcagtgattaacctttagcaataaacgaaagtttaactaagctatactaaccccagggttggtcaatttcgtgccagccacaccctggagctagcaaaaaaaa

SEQ ID NO: 320 - DNA, 5915 bp, synthetic construct
  source 1..5915: mol_type = other DNA; note = Synthesized Vaccine Candidate 35
ctcgacattgattattgactagttattaatagtaatcaattacggggtcattagttcatagcccatatatggagttccgcgttacataacttacggtaaatggcccgcctggctgaccgcccaacgacccccgcccattgacgtcaataatgacgtatgttcccatagtaacgccaatagggactttccattgacgtcaatgggtggagtatttacggtaaactgcccacttggcagtacatcaagtgtatcatatgccaagtacgccccctattgacgtcaatgacggtaaatggcccgcctggcattatgcccagtacatgaccttatgggactttcctacttggcagtacatctacgtattagtcatcgctattaccatggtcgaggtgagccccacgttctgcttcactctccccatctcccccccctccccacccccaattttgtatttatttattttttaattattttgtgcagcgatgggggcggggggggggggggggcgcgcgccaggcggggcggggcggggcgaggggcggggcggggcgaggcggagaggtgcggcggcagccaatcagagcggcgcgctccgaaagtttccttttatggcgaggcggcggcggcggcggccctataaaaagcgaagcgcgcggcgggcgggagtcgctgcgcgctgccttcgccccgtgccccgctccgccgccgcctcgcgccgcccgccccggctctgactgaccgcgttactcccacaggtgagcgggcgggacggcccttctcctccgggctgtaattagcgcttggtttaatgacggcttgtttcttttctgtggctgcgtgaaagccttgaggggctccgggagggccctttgtgcggggggagcggctcggggggtgcgtgcgtgtgtgtgtgcgtggggagcgccgcgtgcggctccgcgctgcccggcggctgtgagcgctgcgggcgcggcgcggggctttgtgcgctccgcagtgtgcgcgaggggagcgcggccgggggcggtgccccgcggtgcggggggggctgcgaggggaacaaaggctgcgtgcggggtgtgtgcgtgggggggtgagcagggggtgtgggcgcgtcggtcgggctgcaaccccccctgcacccccctccccgagttgctgagcacggcccggcttcgggtgcggggctccgtacggggcgtggcgcggggctcgccgtgccgggcggggggtggcggcaggtgggggtgccgggcggggcggggccgcctcgggccggggagggctcgggggaggggcgcggcggcccccggagcgccggcggctgtcgaggcgcggcgagccgcagccattgccttttatggtaatcgtgcgagagggcgcagggacttcctttgtcccaaatctgtgcggagccgaaatctgggaggcgccgccgcaccccctctagcgggcgcggggcgaagcggtgcggcgccggcaggaaggaaatgggcggggagggccttcgtgcgtcgccgcgccgccgtccccttctccctctccagcctcggggctgtccgcggggggacggctgccttcgggggggacggggcagggcggggttcggcttctggcgtgtgaccggcggctctagagcctctgctaaccatgttcatgccttcttctttttcctacagctcctgggcaacgtgctggttattgtgctgtctcatcattttggcaaagaattggagaataaactagtattcttctggtccccacagactcagagagaacccgccaccatgttcgtgttcctggtgctgctgcccctggtgagcagccagtgcgtgaacctgaccaccaggacccagctgccccccgcctacaccaacagcttcaccaggggcgtgtactaccccgacaaggtgttcaggagcagcgtgctgcacagcacccaggacctgttcctgcccttcttcagcaacgtgacctggttccacgccatccacgtgagcggcaccaacggcaccaagaggttcgacaaccccgtgctgcccttcaacgacggcgtgtacttcgccagcaccgagaagagcaacatcatcaggggctggatcttcggcaccaccctggacagcaagacccagagcctgctgatcgtgaacaacgccaccaacgtggtgatcaaggtgtgcgagttccagttctgcaacgaccccttcctgggcgtgtactaccacaagaacaacaagagctggatggagagcgagttcagggtgtacagcagcgccaacaactgcaccttcgagtacgtgagccagcccttcctgatggacctggagggcaagcagggcaacttcaagaacctgagggagttcgtgttcaagaacatcgacggctacttcaagatctacagcaagcacacccccatcaacctggtgagggacctgccccagggcttcagcgccctggagcccctggtggacctgcccatcggcatcaacatcaccaggttccagaccctgctggccctgcacaggagctacctgacccccggcgacagcagcagcggctggaccgccggcgccgccgcctactacgtgggctacctgcagcccaggaccttcctgctgaagtacaacgagaacggcaccatcaccgacgccgtggactgcgccctggaccccctgagcgagaccaagtgcaccctgaagagcttcaccgtggagaagggcatctaccagaccagcaacttcagggtgcagcccaccgagagcatcgtgaggttccccaacatcaccaacctgtgccccttcggcgaggtgttcaacgccaccaggttcgccagcgtgtacgcctggaacaggaagaggatcagcaactgcgtggccgactacagcgtgctgtacaacagcgccagcttcagcaccttcaagtgctacggcgtgagccccaccaagctgaacgacctgtgcttcaccaacgtgtacgccgacagcttcgtgatcaggggcgacgaggtgaggcagatcgcccccggccagaccggcaagatcgccgactacaactacaagctgcccgacgacttcaccggctgcgtgatcgcctggaacagcaacaacctggacagcaaggtgggcggcaactacaactacctgtacaggctgttcaggaagagcaacctgaagcccttcgagagggacatcagcaccgagatctaccaggccggcagcaccccctgcaacggcgtggagggcttcaactgctacttccccctgcagagctacggcttccagcccaccaacggcgtgggctaccagccctacagggtggtggtgctgagcttcgagctgctgcacgcccccgccaccgtgtgcggccccaagaagagcaccaacctggtgaagaacaagtgcgtgaacttcaacttcaacggcctgaccggcaccggcgtgctgaccgagagcaacaagaagttcctgcccttccagcagttcggcagggacatcgccgacaccaccgacgccgtgagggacccccagaccctggagatcctggacatcaccccctgcagcttcggcggcgtgagcgtgatcacccccggcaccaacaccagcaaccaggtggccgtgctgtaccaggacgtgaactgcaccgaggtgcccgtggccatccacgccgaccagctgacccccacctggagggtgtacagcaccggcagcaacgtgttccagaccagggccggctgcctgatcggcgccgagcacgtgaacaacagctacgagtgcgacatccccatcggcgccggcatctgcgccagctaccagacccagaccaacagccccaggagggccaggagcgtggccagccagagcatcatcgcctacaccatgagcctgggcgccgagaacagcgtggcctacagcaacaacagcatcgccatccccaccaacttcaccatcagcgtgaccaccgagatcctgcccgtgagcatgaccaagaccagcgtggactgcaccatgtacatctgcggcgacagcaccgagtgcagcaacctgctgctgcagtacggcagcttctgcacccagctgaacagggccctgaccggcatcgccgtggagcaggacaagaacacccaggaggtgttcgcccaggtgaagcagatctacaagaccccccccatcaaggacttcggcggcttcaacttcagccagatcctgcccgaccccagcaagcccagcaagaggagcttcatcgaggacctgctgttcaacaaggtgaccctggccgacgccggcttcatcaagcagtacggcgactgcctgggcgacatcgccgccagggacctgatctgcgcccagaagttcaacggcctgaccgtgctgccccccctgctgaccgacgagatgatcgcccagtacaccagcgccctgctggccggcaccatcaccagcggctggaccttcggcgccggcgccgccctgcagatccccttcgccatgcagatggcctacaggttcaacggcatcggcgtgacccagaacgtgctgtacgagaaccagaagctgatcgccaaccagttcaacagcgccatcggcaagatccaggacagcctgagcagcaccgccagcgccctgggcaagctgcaggacgtggtgaaccagaacgcccaggccctgaacaccctggtgaagcagctgagcagcaacttcggcgccatcagcagcgtgctgaacgacatcctgagcaggctggacccccccgaggccgaggtgcagatcgacaggctgatcaccggcaggctgcagagcctgcagacctacgtgacccagcagctgatcagggccgccgagatcagggccagcgccaacctggccgccaccaagatgagcgagtgcgtgctgggccagagcaagagggtggacttctgcggcaagggctaccacctgatgagcttcccccagagcgccccccacggcgtggtgttcctgcacgtgacctacgtgcccgcccaggagaagaacttcaccaccgcccccgccatctgccacgacggcaaggcccacttccccagggagggcgtgttcgtgagcaacggcacccactggttcgtgacccagaggaacttctacgagccccagatcatcaccaccgacaacaccttcgtgagcggcaactgcgacgtggtgatcggcatcgtgaacaacaccgtgtacgaccccctgcagcccgagctggacagcttcaaggaggagctggacaagtacttcaagaaccacaccagccccgacgtggacctgggcgacatcagcggcatcaacgccagcgtggtgaacatccagaaggagatcgacaggctgaacgaggtggccaagaacctgaacgagagcctgatcgacctgcaggagctgggcaagtacgagcagtacatcaagtggccctggtacatctggctgggcttcatcgccggcctgatcgccatcgtgatggtgaccatcatgctgtgctgcatgaccagctgctgcagctgcctgaagggctgctgcagctgcggcagctgctgcaagttcgacgaggacgacagcgagcccgtgctgaagggcgtgaagctgcactacacctgatgactcgagctggtactgcatgcacgcaatgctagctgcccctttcccgtcctgggtaccccgagtctcccccgacctcgggtcccaggtatgctcccacctccacctgccccactcaccacctctgctagttccagacacctcccaagcacgcagcaatgcagctcaaaacgcttagcctagccacacccccacgggaaacagcagtgattaacctttagcaataaacgaaagtttaactaagctatactaaccccagggttggtcaatttcgtgccagccacaccctggagctagcaaaaaaaa

SEQ ID NO: 321 - DNA, 4771 bp, synthetic construct
  source 1..4771: mol_type = other DNA; note = Synthesized Vaccine Candidate 36
tagttattaatagtaatcaattacggggtcattagttcatagcccatatatggagttccgcgttacataacttacggtaaatggcccgcctggctgaccgcccaacgacccccgcccattgacgtcaataatgacgtatgttcccatagtaacgccaatagggactttccattgacgtcaatgggtggagtatttacggtaaactgcccacttggcagtacatcaagtgtatcatatgccaagtacgccccctattgacgtcaatgacggtaaatggcccgcctggcattatgcccagtacatgaccttatgggactttcctacttggcagtacatctacgtattagtcatcgctattaccatggtgatgcggttttggcagtacatcaatgggcgtggatagcggtttgactcacggggatttccaagtctccaccccattgacgtcaatgggagtttgttttggcaccaaaatcaacgggactttccaaaatgtcgtaacaactccgccccattgacgcaaatgggcggtaggcgtgtacggtgggaggtctatataagcagagctggtttagtgaaccgtcagatcgagaataaactagtattcttctggtccccacagactcagagagaacccgccaccatgttcgtgttcctggtgctgctgcccctggtgagcagccagtgcgtgaacctgaccaccaggacccagctgccccccgcctacaccaacagcttcaccaggggcgtgtactaccccgacaaggtgttcaggagcagcgtgctgcacagcacccaggacctgttcctgcccttcttcagcaacgtgacctggttccacgccatccacgtgagcggcaccaacggcaccaagaggttcgacaaccccgtgctgcccttcaacgacggcgtgtacttcgccagcaccgagaagagcaacatcatcaggggctggatcttcggcaccaccctggacagcaagacccagagcctgctgatcgtgaacaacgccaccaacgtggtgatcaaggtgtgcgagttccagttctgcaacgaccccttcctgggcgtgtactaccacaagaacaacaagagctggatggagagcgagttcagggtgtacagcagcgccaacaactgcaccttcgagtacgtgagccagcccttcctgatggacctggagggcaagcagggcaacttcaagaacctgagggagttcgtgttcaagaacatcgacggctacttcaagatctacagcaagcacacccccatcaacctggtgagggacctgccccagggcttcagcgccctggagcccctggtggacctgcccatcggcatcaacatcaccaggttccagaccctgctggccctgcacaggagctacctgacccccggcgacagcagcagcggctggaccgccggcgccgccgcctactacgtgggctacctgcagcccaggaccttcctgctgaagtacaacgagaacggcaccatcaccgacgccgtggactgcgccctggaccccctgagcgagaccaagtgcaccctgaagagcttcaccgtggagaagggcatctaccagaccagcaacttcagggtgcagcccaccgagagcatcgtgaggttccccaacatcaccaacctgtgccccttcggcgaggtgttcaacgccaccaggttcgccagcgtgtacgcctggaacaggaagaggatcagcaactgcgtggccgactacagcgtgctgtacaacagcgccagcttcagcaccttcaagtgctacggcgtgagccccaccaagctgaacgacctgtgcttcaccaacgtgtacgccgacagcttcgtgatcaggggcgacgaggtgaggcagatcgcccccggccagaccggcaagatcgccgactacaactacaagctgcccgacgacttcaccggctgcgtgatcgcctggaacagcaacaacctggacagcaaggtgggcggcaactacaactacctgtacaggctgttcaggaagagcaacctgaagcccttcgagagggacatcagcaccgagatctaccaggccggcagcaccccctgcaacggcgtggagggcttcaactgctacttccccctgcagagctacggcttccagcccaccaacggcgtgggctaccagccctacagggtggtggtgctgagcttcgagctgctgcacgcccccgccaccgtgtgcggccccaagaagagcaccaacctggtgaagaacaagtgcgtgaacttcaacttcaacggcctgaccggcaccggcgtgctgaccgagagcaacaagaagttcctgcccttccagcagttcggcagggacatcgccgacaccaccgacgccgtgagggacccccagaccctggagatcctggacatcaccccctgcagcttcggcggcgtgagcgtgatcacccccggcaccaacaccagcaaccaggtggccgtgctgtaccaggacgtgaactgcaccgaggtgcccgtggccatccacgccgaccagctgacccccacctggagggtgtacagcaccggcagcaacgtgttccagaccagggccggctgcctgatcggcgccgagcacgtgaacaacagctacgagtgcgacatccccatcggcgccggcatctgcgccagctaccagacccagaccaacagccccggcagcgccagcagcgtggccagccagagcatcatcgcctacaccatgagcctgggcgccgagaacagcgtggcctacagcaacaacagcatcgccatccccaccaacttcaccatcagcgtgaccaccgagatcctgcccgtgagcatgaccaagaccagcgtggactgcaccatgtacatctgcggcgacagcaccgagtgcagcaacctgctgctgcagtacggcagcttctgcacccagctgaacagggccctgaccggcatcgccgtggagcaggacaagaacacccaggaggtgttcgcccaggtgaagcagatctacaagaccccccccatcaaggacttcggcggcttcaacttcagccagatcctgcccgaccccagcaagcccagcaagaggagccccatcgaggacctgctgttcaacaaggtgaccctggccgacgccggcttcatcaagcagtacggcgactgcctgggcgacatcgccgccagggacctgatctgcgcccagaagttcaacggcctgaccgtgctgccccccctgctgaccgacgagatgatcgcccagtacaccagcgccctgctggccggcaccatcaccagcggctggaccttcggcgccggccccgccctgcagatccccttccccatgcagatggcctacaggttcaacggcatcggcgtgacccagaacgtgctgtacgagaaccagaagctgatcgccaaccagttcaacagcgccatcggcaagatccaggacagcctgagcagcacccccagcgccctgggcaagctgcaggacgtggtgaaccagaacgcccaggccctgaacaccctggtgaagcagctgagcagcaacttcggcgccatcagcagcgtgctgaacgacatcctgagcaggctggacccccccgaggccgaggtgcagatcgacaggctgatcaccggcaggctgcagagcctgcagacctacgtgacccagcagctgatcagggccgccgagatcagggccagcgccaacctggccgccaccaagatgagcgagtgcgtgctgggccagagcaagagggtggacttctgcggcaagggctaccacctgatgagcttcccccagagcgccccccacggcgtggtgttcctgcacgtgacctacgtgcccgcccaggagaagaacttcaccaccgcccccgccatctgccacgacggcaaggcccacttccccagggagggcgtgttcgtgagcaacggcacccactggttcgtgacccagaggaacttctacgagccccagatcatcaccaccgacaacaccttcgtgagcggcaactgcgacgtggtgatcggcatcgtgaacaacaccgtgtacgaccccctgcagcccgagctggacagcttcaaggaggagctggacaagtacttcaagaaccacaccagccccgacgtggacctgggcgacatcagcggcatcaacgccagcgtggtgaacatccagaaggagatcgacaggctgaacgaggtggccaagaacctgaacgagagcctgatcgacctgcaggagctgggcaagtacgagcagtacatcaagtggccctggtacatctggctgggcttcatcgccggcctgatcgccatcgtgatggtgaccatcatgctgtgctgcatgaccagctgctgcagctgcctgaagggctgctgcagctgcggcagctgctgcaagttcgacgaggacgacagcgagcccgtgctgaagggcgtgaagctgcactacacctgatgactcgagctggtactgcatgcacgcaatgctagctgcccctttcccgtcctgggtaccccgagtctcccccgacctcgggtcccaggtatgctcccacctccacctgccccactcaccacctctgctagttccagacacctcccaagcacgcagcaatgcagctcaaaacgcttagcctagccacacccccacgggaaacagcagtgattaacctttagcaataaacgaaagtttaactaagctatactaaccccagggttggtcaatttcgtgccagccacaccctggagctagcaaaaaaaa

SEQ ID NO: 322 - DNA, 4771 bp, synthetic construct
  source 1..4771: mol_type = other DNA; note = Synthesized Vaccine Candidate 37
tagttattaatagtaatcaattacggggtcattagttcatagcccatatatggagttccgcgttacataacttacggtaaatggcccgcctggctgaccgcccaacgacccccgcccattgacgtcaataatgacgtatgttcccatagtaacgccaatagggactttccattgacgtcaatgggtggagtatttacggtaaactgcccacttggcagtacatcaagtgtatcatatgccaagtacgccccctattgacgtcaatgacggtaaatggcccgcctggcattatgcccagtacatgaccttatgggactttcctacttggcagtacatctacgtattagtcatcgctattaccatggtgatgcggttttggcagtacatcaatgggcgtggatagcggtttgactcacggggatttccaagtctccaccccattgacgtcaatgggagtttgttttggcaccaaaatcaacgggactttccaaaatgtcgtaacaactccgccccattgacgcaaatgggcggtaggcgtgtacggtgggaggtctatataagcagagctggtttagtgaaccgtcagatcgagaataaactagtattcttctggtccccacagactcagagagaacccgccaccatgttcgtgttcctggtgctgctgcccctggtgagcagccagtgcgtgaacctgaccaccaggacccagctgccccccgcctacaccaacagcttcaccaggggcgtgtactaccccgacaaggtgttcaggagcagcgtgctgcacagcacccaggacctgttcctgcccttcttcagcaacgtgacctggttccacgccatccacgtgagcggcaccaacggcaccaagaggttcgacaaccccgtgctgcccttcaacgacggcgtgtacttcgccagcaccgagaagagcaacatcatcaggggctggatcttcggcaccaccctggacagcaagacccagagcctgctgatcgtgaacaacgccaccaacgtggtgatcaaggtgtgcgagttccagttctgcaacgaccccttcctgggcgtgtactaccacaagaacaacaagagctggatggagagcgagttcagggtgtacagcagcgccaacaactgcaccttcgagtacgtgagccagcccttcctgatggacctggagggcaagcagggcaacttcaagaacctgagggagttcgtgttcaagaacatcgacggctacttcaagatctacagcaagcacacccccatcaacctggtgagggacctgccccagggcttcagcgccctggagcccctggtggacctgcccatcggcatcaacatcaccaggttccagaccctgctggccctgcacaggagctacctgacccccggcgacagcagcagcggctggaccgccggcgccgccgcctactacgtgggctacctgcagcccaggaccttcctgctgaagtacaacgagaacggcaccatcaccgacgccgtggactgcgccctggaccccctgagcgagaccaagtgcaccctgaagagcttcaccgtggagaagggcatctaccagaccagcaacttcagggtgcagcccaccgagagcatcgtgaggttccccaacatcaccaacctgtgccccttcggcgaggtgttcaacgccaccaggttcgccagcgtgtacgcctggaacaggaagaggatcagcaactgcgtggccgactacagcgtgctgtacaacagcgccagcttcagcaccttcaagtgctacggcgtgagccccaccaagctgaacgacctgtgcttcaccaacgtgtacgccgacagcttcgtgatcaggggcgacgaggtgaggcagatcgcccccggccagaccggcaagatcgccgactacaactacaagctgcccgacgacttcaccggctgcgtgatcgcctggaacagcaacaacctggacagcaaggtgggcggcaactacaactacctgtacaggctgttcaggaagagcaacctgaagcccttcgagagggacatcagcaccgagatctaccaggccggcagcaccccctgcaacggcgtggagggcttcaactgctacttccccctgcagagctacggcttccagcccaccaacggcgtgggctaccagccctacagggtggtggtgctgagcttcgagctgctgcacgcccccgccaccgtgtgcggccccaagaagagcaccaacctggtgaagaacaagtgcgtgaacttcaacttcaacggcctgaccggcaccggcgtgctgaccgagagcaacaagaagttcctgcccttccagcagttcggcagggacatcgccgacaccaccgacgccgtgagggacccccagaccctggagatcctggacatcaccccctgcagcttcggcggcgtgagcgtgatcacccccggcaccaacaccagcaaccaggtggccgtgctgtaccaggacgtgaactgcaccgaggtgcccgtggccatccacgccgaccagctgacccccacctggagggtgtacagcaccggcagcaacgtgttccagaccagggccggctgcctgatcggcgccgagcacgtgaacaacagctacgagtgcgacatccccatcggcgccggcatctgcgccagctaccagacccagaccaacagccccaggagggccaggagcgtggccagccagagcatcatcgcctacaccatgagcctgggcgccgagaacagcgtggcctacagcaacaacagcatcgccatccccaccaacttcaccatcagcgtgaccaccgagatcctgcccgtgagcatgaccaagaccagcgtggactgcaccatgtacatctgcggcgacagcaccgagtgcagcaacctgctgctgcagtacggcagcttctgcacccagctgaacagggccctgaccggcatcgccgtggagcaggacaagaacacccaggaggtgttcgcccaggtgaagcagatctacaagaccccccccatcaaggacttcggcggcttcaacttcagccagatcctgcccgaccccagcaagcccagcaagaggagcttcatcgaggacctgctgttcaacaaggtgaccctggccgacgccggcttcatcaagcagtacggcgactgcctgggcgacatcgccgccagggacctgatctgcgcccagaagttcaacggcctgaccgtgctgccccccctgctgaccgacgagatgatcgcccagtacaccagcgccctgctggccggcaccatcaccagcggctggaccttcggcgccggcgccgccctgcagatccccttcgccatgcagatggcctacaggttcaacggcatcggcgtgacccagaacgtgctgtacgagaaccagaagctgatcgccaaccagttcaacagcgccatcggcaagatccaggacagcctgagcagcaccgccagcgccctgggcaagctgcaggacgtggtgaaccagaacgcccaggccctgaacaccctggtgaagcagctgagcagcaacttcggcgccatcagcagcgtgctgaacgacatcctgagcaggctggacccccccgaggccgaggtgcagatcgacaggctgatcaccggcaggctgcagagcctgcagacctacgtgacccagcagctgatcagggccgccgagatcagggccagcgccaacctggccgccaccaagatgagcgagtgcgtgctgggccagagcaagagggtggacttctgcggcaagggctaccacctgatgagcttcccccagagcgccccccacggcgtggtgttcctgcacgtgacctacgtgcccgcccaggagaagaacttcaccaccgcccccgccatctgccacgacggcaaggcccacttccccagggagggcgtgttcgtgagcaacggcacccactggttcgtgacccagaggaacttctacgagccccagatcatcaccaccgacaacaccttcgtgagcggcaactgcgacgtggtgatcggcatcgtgaacaacaccgtgtacgaccccctgcagcccgagctggacagcttcaaggaggagctggacaagtacttcaagaaccacaccagccccgacgtggacctgggcgacatcagcggcatcaacgccagcgtggtgaacatccagaaggagatcgacaggctgaacgaggtggccaagaacctgaacgagagcctgatcgacctgcaggagctgggcaagtacgagcagtacatcaagtggccctggtacatctggctgggcttcatcgccggcctgatcgccatcgtgatggtgaccatcatgctgtgctgcatgaccagctgctgcagctgcctgaagggctgctgcagctgcggcagctgctgcaagttcgacgaggacgacagcgagcccgtgctgaagggcgtgaagctgcactacacctgatgactcgagctggtactgcatgcacgcaatgctagctgcccctttcccgtcctgggtaccccgagtctcccccgacctcgggtcccaggtatgctcccacctccacctgccccactcaccacctctgctagttccagacacctcccaagcacgcagcaatgcagctcaaaacgcttagcctagccacacccccacgggaaacagcagtgattaacctttagcaataaacgaaagtttaactaagctatactaaccccagggttggtcaatttcgtgccagccacaccctggagctagcaaaaaaaa

SEQ ID NO: 323 - DNA, 2209 bp, synthetic construct
  source 1..2209: mol_type = other DNA; note = Synthesized Vaccine Candidate 38
tagttattaatagtaatcaattacggggtcattagttcatagcccatatatggagttccgcgttacataacttacggtaaatggcccgcctggctgaccgcccaacgacccccgcccattgacgtcaataatgacgtatgttcccatagtaacgccaatagggactttccattgacgtcaatgggtggagtatttacggtaaactgcccacttggcagtacatcaagtgtatcatatgccaagtacgccccctattgacgtcaatgacggtaaatggcccgcctggcattatgcccagtacatgaccttatgggactttcctacttggcagtacatctacgtattagtcatcgctattaccatggtgatgcggttttggcagtacatcaatgggcgtggatagcggtttgactcacggggatttccaagtctccaccccattgacgtcaatgggagtttgttttggcaccaaaatcaacgggactttccaaaatgtcgtaacaactccgccccattgacgcaaatgggcggtaggcgtgtacggtgggaggtctatataagcagagctggtttagtgaaccgtcagatcgagaataaactagtattcttctggtccccacagactcagagagaacccgccaccatgagcgacaacggcccccagaaccagaggaacgcccccaggatcaccttcggcggccccagcgacagcaccggcagcaaccagaacggcgagaggagcggcgccaggagcaagcagaggaggccccagggcctgcccaacaacaccgccagctggttcaccgccctgacccagcacggcaaggaggacctgaagttccccaggggccagggcgtgcccatcaacaccaacagcagccccgacgaccagatcggctactacaggagggccaccaggaggatcaggggcggcgacggcaagatgaaggacctgagccccaggtggtacttctactacctgggcaccggccccgaggccggcctgccctacggcgccaacaaggacggcatcatctgggtggccaccgagggcgccctgaacacccccaaggaccacatcggcaccaggaaccccgccaacaacgccgccatcgtgctgcagctgccccagggcaccaccctgcccaagggcttctacgccgagggcagcaggggcggcagccaggccagcagcaggagcagcagcaggagcaggaacagcagcaggaacagcacccccggcagcagcaggggcaccagccccgccaggatggccggcaacggcggcgacgccgccctggccctgctgctgctggacaggctgaaccagctggagagcaagatgagcggcaagggccagcagcagcagggccagaccgtgaccaagaagagcgccgccgaggccagcaagaagcccaggcagaagaggaccgccaccaaggcctacaacgtgacccaggccttcggcaggaggggccccgagcagacccagggcaacttcggcgaccaggagctgatcaggcagggcaccgactacaagcactggccccagatcgcccagttcgcccccagcgccagcgccttcttcggcatgagcaggatcggcatggaggtgacccccagcggcacctggctgacctacaccggcgccatcaagctggacgacaaggaccccaacttcaaggaccaggtgatcctgctgaacaagcacatcgacgcctacaagaccttcccccccaccgagcccaagaaggacaagaagaagaaggccgacgagacccaggccctgccccagaggcagaagaagcagcagaccgtgaccctgctgcccgccgccgacctggacgacttcagcaagcagctgcagcagagcatgagcagcgccgacagcacccaggcctgatgactcgagctggtactgcatgcacgcaatgctagctgcccctttcccgtcctgggtaccccgagtctcccccgacctcgggtcccaggtatgctcccacctccacctgccccactcaccacctctgctagttccagacacctcccaagcacgcagcaatgcagctcaaaacgcttagcctagccacacccccacgggaaacagcagtgattaacctttagcaataaacgaaagtttaactaagctatactaaccccagggttggtcaatttcgtgccagccacaccctggagctagcaaaaaaaa

SEQ ID NO: 324 - DNA, 4639 bp, synthetic construct
  source 1..4639: mol_type = other DNA; note = Synthesized Vaccine Candidate 39
tagttattaatagtaatcaattacggggtcattagttcatagcccatatatggagttccgcgttacataacttacggtaaatggcccgcctggctgaccgcccaacgacccccgcccattgacgtcaataatgacgtatgttcccatagtaacgccaatagggactttccattgacgtcaatgggtggagtatttacggtaaactgcccacttggcagtacatcaagtgtatcatatgccaagtacgccccctattgacgtcaatgacggtaaatggcccgcctggcattatgcccagtacatgaccttatgggactttcctacttggcagtacatctacgtattagtcatcgctattaccatggtgatgcggttttggcagtacatcaatgggcgtggatagcggtttgactcacggggatttccaagtctccaccccattgacgtcaatgggagtttgttttggcaccaaaatcaacgggactttccaaaatgtcgtaacaactccgccccattgacgcaaatgggcggtaggcgtgtacggtgggaggtctatataagcagagctggtttagtgaaccgtcagatcgagaataaactagtattcttctggtccccacagactcagagagaacccgccaccatggaccaggaaccccgcctggaggaaggccgtgttcatcagcccctacaacagccagaacgccgtggccagcaagatcctgggcctgcccacccagaccgtggacagcagccagggcagcgagtacgactacgtgatcttcacccagaccaccgagaccgcccacagctgcaacgtgaacaggttcaacgtggccatcaccagggccaaggtgggcatcctgtgcatcatgagcgacagggacctgtacgacaagctgcagttcaccagcctggagatccccaggaggaacgtggccaccctgcaggccgagaacgtgaccggcctgttcaaggactgcagcaaggtgatcaccggcctgcaccccacccaggcccccacccacctgagcgtggacaccaagttcaagaccgagggcctgtgcgtggacatccccggcatccccaaggacatgacctacaggaggctgatcagcatgatgggcttcaagatgaactaccaggtgaacggctaccccaacatgttcatcaccagggaggaggccatcaggcacgtgagggcctggatcggcttcgacgtggagggctgccacgccaccagggaggccgtgggcaccaacctgcccctgcagctgggcttcagcaccggcgtgaacctggtggccgtgcccaccggctacgtggacacccccaacaacaccgacttcagcagggtgagcgccaagcccccccccggcgaccagttcaagcacctgatccccctgatgtacaagggcctgccctggaacgtggtgaggatcaagatcgtgcagatgctgagcgacaccctgaagaacctgagcgacagggtggtgttcgtgctgtgggcccacggcttcgagctgaccagcatgaagtacttcgtgaagatcggccccgagaggacctgctgcctgtgcgacaggagggccacctgcttcagcaccgccagcgacacctacgcctgctggcaccacagcatcggcttcgactacgtgtacaaccccttcatgatcgacgtgcagcagtggggcttcaccggcaacctgcagagcaaccacgacctgtactgccaggtgcacggcaacgcccacgtggccagctgcgacgccatcatgaccaggtgcctggccgtgcacgagtgcttcgtgaagagggtggactggaccatcgagtaccccatcatcggcgacgagctgaagatcaacgccgcctgcaggaaggtgcagcacatggtggtgaaggccgccctgctggccgacaagttccccgtgctgcacgacatcggcaaccccaaggccatcaagtgcgtgccccaggccgacgtggagtggaagttctacgacgcccagccctgcagcgacaaggcctacaagatcgaggagctgttctacagctacgccacccacagcgacaagttcaccgacggcgtgtgcctgttctggaactgcaacgtggacaggtaccccgccaacagcatcgtgtgcaggttcgacaccagggtgctgagcaacctgaacctgcccggctgcgacggcggcagcctgtacgtgaacaagcacgccttccacacccccgccttcgacaagagcgccttcgtgaacctgaagcagctgcccttcttctactacagcgacagcccctgcgagagccacggcaagcaggtggtgagcgacatcgactacgtgcccctgaagagcgccacctgcatcaccaggtgcaacctgggcggcgccgtgtgcaggcaccacgccaacgagtacaggctgtacctggacgcctacaacatgatgatcagcgccggcttcagcctgtgggtgtacaagcagttcgacacctacaacctgtggaacaccttcaccaggctgcagagcctggagaacgtggccttcaacgtggtgaacaagggccacttcgacggccagcagggcgaggtgcccgtgagcatcatcaacaacaccgtgtacaccaaggtggacggcgtggacgtggagctgttcgagaacaagaccaccctgcccgtgaacgtggccttcgagctgtgggccaagaggaacatcaagcccgtgcccgaggtgaagatcctgaacaacctgggcgtggacatcgccgccaacaccgtgatctgggactacaagagggacgcccccgcccacatcagcaccatcggcgtgtgcagcatgaccgacatcgccaagaagcccaccgagaccatctgcgcccccctgaccgtgttcttcgacggcagggtggacggccaggtggacctgttcaggaacgccaggaacggcgtgctgatcaccgagggcagcgtgaagggcctgcagcccagcgtgggccccaagcaggccagcctgaacggcgtgaccctgatcggcgaggccgtgaagacccagttcaactactacaagaaggtggacggcgtggtgcagcagctgcccgagacctacttcacccagagcaggaacctgcaggagttcaagcccaggagccagatggagatcgacttcctggagctggccatggacgagttcatcgagaggtacaagctggagggctacgccttcgagcacatcgtgtacggcgacttcagccacagccagctgggcggcctgcacctgctgatcggcctggccaagaggttcaaggagagccccttcgagctggaggacttcatccccatggacagcaccgtgaagaactacttcatcaccgacgcccagaccggcagcagcaagtgcgtgtgcagcgtgatcgacctgctgctggacgacttcgtggagatcatcaagagccaggacctgagcgtggtgagcaaggtggtgaaggtgaccatcgactacaccgagatcagcttcatgctgtggtgcaaggacggccacgtggagaccttctaccccaagctgcagagcagccaggcctggcagcccggcgtggccatgcccaacctgtacaagatgcagaggatgctgctggagaagtgcgacctgcagaactacggcgacagcgccaccctgcccaagggcatcatgatgaacgtggccaagtacacccagctgtgccagtacctgaacaccctgaccctggccgtgccctacaacatgagggtgatccacttcggcgccggcagcgacaagggcgtggcccccggcaccgccgtgctgaggcagtggctgcccaccggcaccctgctggtggacagcgacctgaacgacttcgtgagcgacgccgacagcaccctgatcggcgactgcgccaccgtgcacaccgccaacaagtgggacctgatcatcagcgacatgtacgaccccaagaccaagaacgtgaccaaggagaacgacagcaaggagggcttcttcacctacatctgcggcttcatccagcagaagctggccctgggcggcagcgtggccatcaagatcaccgagcacagctggaacgccgacctgtacaagctgatgggccacttcgcctggtggaccgccttcgtgaccaacgtgaacgccagcagcagcgaggccttcctgatcggctgcaactacctgggcaagcccagggagcagatcgacggctacgtgatgcacgccaactacatcttctggaggaacaccaaccccatccagctgagcagctacagcctgttcgacatgagcaagttccccctgaagcttgatgactcgagctggtactgcatgcacgcaatgctagctgcccctttcccgtcctgggtaccccgagtctcccccgacctcgggtcccaggtatgctcccacctccacctgccccactcaccacctctgctagttccagacacctcccaagcacgcagcaatgcagctcaaaacgcttagcctagccacacccccacgggaaacagcagtgattaacctttagcaataaacgaaagtttaactaagctatactaaccccagggttggtcaatttcgtgccagccacaccctggagctagcaaaaaaaa

SEQ ID NO: 325 - DNA, 1177 bp, synthetic construct
  source 1..1177: mol_type = other DNA; note = Synthesized Vaccine Candidate 40
tagttattaatagtaatcaattacggggtcattagttcatagcccatatatggagttccgcgttacataacttacggtaaatggcccgcctggctgaccgcccaacgacccccgcccattgacgtcaataatgacgtatgttcccatagtaacgccaatagggactttccattgacgtcaatgggtggagtatttacggtaaactgcccacttggcagtacatcaagtgtatcatatgccaagtacgccccctattgacgtcaatgacggtaaatggcccgcctggcattatgcccagtacatgaccttatgggactttcctacttggcagtacatctacgtattagtcatcgctattaccatggtgatgcggttttggcagtacatcaatgggcgtggatagcggtttgactcacggggatttccaagtctccaccccattgacgtcaatgggagtttgttttggcaccaaaatcaacgggactttccaaaatgtcgtaacaactccgccccattgacgcaaatgggcggtaggcgtgtacggtgggaggtctatataagcagagctggtttagtgaaccgtcagatcgagaataaactagtattcttctggtccccacagactcagagagaacccgccaccatgtacagcttcgtgagcgaggagaccggcaccctgatcgtgaacagcgtgctgctgttcctggccttcgtggtgttcctgctggtgaccctggccatcctgaccgccctgaggctgtgcgcctactgctgcaacatcgtgaacgtgagcctggtgaagcccagcttctacgtgtacagcagggtgaagaacctgaacagcagcagggtgcccgacctgctggtgtgatgactcgagctggtactgcatgcacgcaatgctagctgcccctttcccgtcctgggtaccccgagtctcccccgacctcgggtcccaggtatgctcccacctccacctgccccactcaccacctctgctagttccagacacctcccaagcacgcagcaatgcagctcaaaacgcttagcctagccacacccccacgggaaacagcagtgattaacctttagcaataaacgaaagtttaactaagctatactaaccccagggttggtcaatttcgtgccagccacaccctggagctagcaaaaaaaa

SEQ ID NO: 326 - DNA, 1618 bp, synthetic construct
  source 1..1618: mol_type = other DNA; note = Synthesized Vaccine Candidate 41
tagttattaatagtaatcaattacggggtcattagttcatagcccatatatggagttccgcgttacataacttacggtaaatggcccgcctggctgaccgcccaacgacccccgcccattgacgtcaataatgacgtatgttcccatagtaacgccaatagggactttccattgacgtcaatgggtggagtatttacggtaaactgcccacttggcagtacatcaagtgtatcatatgccaagtacgccccctattgacgtcaatgacggtaaatggcccgcctggcattatgcccagtacatgaccttatgggactttcctacttggcagtacatctacgtattagtcatcgctattaccatggtgatgcggttttggcagtacatcaatgggcgtggatagcggtttgactcacggggatttccaagtctccaccccattgacgtcaatgggagtttgttttggcaccaaaatcaacgggactttccaaaatgtcgtaacaactccgccccattgacgcaaatgggcggtaggcgtgtacggtgggaggtctatataagcagagctggtttagtgaaccgtcagatcgagaataaactagtattcttctggtccccacagactcagagagaacccgccaccatggccgacagcaacggcaccatcaccgtggaggagctgaagaagctgctggagcagtggaacctggtgatcggcttcctgttcctgacctggatctgcctgctgcagttcgcctacgccaacaggaacaggttcctgtacatcatcaagctgatcttcctgtggctgctgtggcccgtgaccctggcctgcttcgtgctggccgccgtgtacaggatcaactggatcaccggcggcatcgccatcgccatggcctgcctggtgggcctgatgtggctgagctacttcatcgccagcttcaggctgttcgccaggaccaggagcatgtggagcttcaaccccgagaccaacatcctgctgaacgtgcccctgcacggcaccatcctgaccaggcccctgctggagagcgagctggtgatcggcgccgtgatcctgaggggccacctgaggatcgccggccaccacctgggcaggtgcgacatcaaggacctgcccaaggagatcaccgtggccaccagcaggaccctgagctactacaagctgggcgccagccagagggtggccggcgacagcggcttcgccgcctacagcaggtacaggatcggcaactacaagctgaacaccgaccacagcagcagcagcgacaacatcgccctgctggtgcagtgatgactcgagctggtactgcatgcacgcaatgctagctgcccctttcccgtcctgggtaccccgagtctcccccgacctcgggtcccaggtatgctcccacctccacctgccccactcaccacctctgctagttccagacacctcccaagcacgcagcaatgcagctcaaaacgcttagcctagccacacccccacgggaaacagcagtgattaacctttagcaataaacgaaagtttaactaagctatactaaccccagggttggtcaatttcgtgccagccacaccctggagctagcaaaaaaaa

SEQ ID NO: 327 - DNA, 1039 bp, synthetic construct
  source 1..1039: mol_type = other DNA; note = Synthetic Vaccine Candidate 42
tagttattaatagtaatcaattacggggtcattagttcatagcccatatatggagttccgcgttacataacttacggtaaatggcccgcctggctgaccgcccaacgacccccgcccattgacgtcaataatgacgtatgttcccatagtaacgccaatagggactttccattgacgtcaatgggtggagtatttacggtaaactgcccacttggcagtacatcaagtgtatcatatgccaagtacgccccctattgacgtcaatgacggtaaatggcccgcctggcattatgcccagtacatgaccttatgggactttcctacttggcagtacatctacgtattagtcatcgctattaccatggtgatgcggttttggcagtacatcaatgggcgtggatagcggtttgactcacggggatttccaagtctccaccccattgacgtcaatgggagtttgttttggcaccaaaatcaacgggactttccaaaatgtcgtaacaactccgccccattgacgcaaatgggcggtaggcgtgtacggtgggaggtctatataagcagagctggtttagtgaaccgtcagatcgagaataaactagtattcttctggtccccacagactcagagagaacccgccaccatgaagatcatcctgttcctggccctgatcaccctggccacctgcgagctgtaccactaccaggagtgcgtgaggggcaccaccgtgtgatgactcgagctggtactgcatgcacgcaatgctagctgcccctttcccgtcctgggtaccccgagtctcccccgacctcgggtcccaggtatgctcccacctccacctgccccactcaccacctctgctagttccagacacctcccaagcacgcagcaatgcagctcaaaacgcttagcctagccacacccccacgggaaacagcagtgattaacctttagcaataaacgaaagtttaactaagctatactaaccccagggttggtcaatttcgtgccagccacaccctggagctagcaaaaaaaa

SEQ ID NO: 328 - DNA, 3241 bp, synthetic construct
  source 1..3241: mol_type = other DNA; note = Sythesized Vaccine Candidate 43
tagttattaatagtaatcaattacggggtcattagttcatagcccatatatggagttccgcgttacataacttacggtaaatggcccgcctggctgaccgcccaacgacccccgcccattgacgtcaataatgacgtatgttcccatagtaacgccaatagggactttccattgacgtcaatgggtggagtatttacggtaaactgcccacttggcagtacatcaagtgtatcatatgccaagtacgccccctattgacgtcaatgacggtaaatggcccgcctggcattatgcccagtacatgaccttatgggactttcctacttggcagtacatctacgtattagtcatcgctattaccatggtgatgcggttttggcagtacatcaatgggcgtggatagcggtttgactcacggggatttccaagtctccaccccattgacgtcaatgggagtttgttttggcaccaaaatcaacgggactttccaaaatgtcgtaacaactccgccccattgacgcaaatgggcggtaggcgtgtacggtgggaggtctatataagcagagctggtttagtgaaccgtcagatcgagaataaactagtattcttctggtccccacagactcagagagaacccgccaccatggcccccaccaaggtgaccttcggcgacgacaccgtgatcgaggtgcagggctacaagagcgtgaacatcaccttcgagctggacgagaggatcgacaaggtgctgaacgagaagtgcagcgcctacaccgtggagctgggcaccgaggtgaacgagttcgcctgcgtggtggccgacgccgtgatcaagaccctgcagcccgtgagcgagctgctgacccccctgggcatcgacctggacgagtggagcatggccacctactacctgttcgacgagagcggcgagttcaagctggccagccacatgtactgcagcttctacccccccgacgaggacgaggaggagggcgactgcgaggaggaggagttcgagcccagcacccagtacgagtacggcaccgaggacgactaccagggcaagcccctggagttcggcgccaccagcgccgccctgcagcccgaggaggagcaggaggaggactggctggacgacgacagccagcagaccgtgggccagcaggacggcagcgaggacaaccagaccaccaccatccagaccatcgtggaggtgcagccccagctggagatggagctgacccccgtggtgcagaccatcgaggtgaacagcttcagcggctacctgaagctgaccgacaacgtgtacatcaagaacgccgacatcgtggaggaggccaagaaggtgaagcccaccgtggtggtgaacgccgccaacgtgtacctgaagcacggcggcggcgtggccggcgccctgaacaaggccaccaacaacgccatgcaggtggagagcgacgactacatcgccaccaacggccccctgaaggtgggcggcagctgcgtgctgagcggccacaacctggccaagcactgcctgcacgtggtgggccccaacgtgaacaagggcgaggacatccagctgctgaagagcgcctacgagaacttcaaccagcacgaggtgctgctggcccccctgctgagcgccggcatcttcggcgccgaccccatccacagcctgagggtgtgcgtggacaccgtgaggaccaacgtgtacctggccgtgttcgacaagaacctgtacgacaagctggtgagcagcttcctggagatgaagagcgagaagcaggtggagcagaagatcgccgagatccccaaggaggaggtgaagcccttcatcaccgagagcaagcccagcgtggagcagaggaagcaggacgacaagaagatcaaggcctgcgtggaggaggtgaccaccaccctggaggagaccaagttcctgaccgagaacctgctgctgtacatcgacatcaacggcaacctgcaccccgacagcgccaccctggtgagcgacatcgacatcaccttcctgaagaaggacgccccctacatcgtgggcgacgtggtgcaggagggcgtgctgaccgccgtggtgatccccaccaagaaggccggcggcaccaccgagatgctggccaaggccctgaggaaggtgcccaccgacaactacatcaccacctaccccggccagggcctgaacggctacaccgtggaggaggccaagaccgtgctgaagaagtgcaagagcgccttctacatcctgcccagcatcatcagcaacgagaagcaggagatcctgggcaccgtgagctggaacctgagggagatgctggcccacgccgaggagaccaggaagctgatgcccgtgtgcgtggagaccaaggccatcgtgagcaccatccagaggaagtacaagggcatcaagatccaggagggcgtggtggactacggcgccaggttctacttctacaccagcaagaccaccgtggccagcctgatcaacaccctgaacgacctgaacgagaccctggtgaccatgcccctgggctacgtgacccacggcctgaacctggaggaggccgccaggtacatgaggagcctgaaggtgcccgccaccgtgagcgtgagcagccccgacgccgtgaccgcctacaacggctacctgaccagcagcagcaagacccccgaggagcacttcatcgagaccatcagcctggccggcagctacaaggactggagctacagcggccagagcacccagctgggcatcgagttcctgaagaggggcgacaagagcgtgtactacaccagcaaccccaccaccttccacctggacggcgaggtgatcaccttcgacaacctgaagaccctgctgagcctgagggaggtgaggaccatcaaggtgttcaccaccgtggacaacatcaacctgcactgatgactcgagctggtactgcatgcacgcaatgctagctgcccctttcccgtcctgggtaccccgagtctcccccgacctcgggtcccaggtatgctcccacctccacctgccccactcaccacctctgctagttccagacacctcccaagcacgcagcaatgcagctcaaaacgcttagcctagccacacccccacgggaaacagcagtgattaacctttagcaataaacgaaagtttaactaagctatactaaccccagggttggtcaatttcgtgccagccacaccctggagctagcaaaaaaaa

SEQ ID NO: 329 - DNA, 1873 bp, synthetic construct
  source 1..1873: mol_type = other DNA; note = Synthesized Vaccine Candidate 44
tagttattaatagtaatcaattacggggtcattagttcatagcccatatatggagttccgcgttacataacttacggtaaatggcccgcctggctgaccgcccaacgacccccgcccattgacgtcaataatgacgtatgttcccatagtaacgccaatagggactttccattgacgtcaatgggtggagtatttacggtaaactgcccacttggcagtacatcaagtgtatcatatgccaagtacgccccctattgacgtcaatgacggtaaatggcccgcctggcattatgcccagtacatgaccttatgggactttcctacttggcagtacatctacgtattagtcatcgctattaccatggtgatgcggttttggcagtacatcaatgggcgtggatagcggtttgactcacggggatttccaagtctccaccccattgacgtcaatgggagtttgttttggcaccaaaatcaacgggactttccaaaatgtcgtaacaactccgccccattgacgcaaatgggcggtaggcgtgtacggtgggaggtctatataagcagagctggtttagtgaaccgtcagatcgagaataaactagtattcttctggtccccacagactcagagagaacccgccaccatgagcggcttcaggaagatggccttccccagcggcaaggtggagggctgcatggtgcaggtgacctgcggcaccaccaccctgaacggcctgtggctggacgacgtggtgtactgccccaggcacgtgatctgcaccagcgaggacatgctgaaccccaactacgaggacctgctgatcaggaagagcaaccacaacttcctggtgcaggccggcaacgtgcagctgagggtgatcggccacagcatgcagaactgcgtgctgaagctgaaggtggacaccgccaaccccaagacccccaagtacaagttcgtgaggatccagcccggccagaccttcagcgtgctggcctgctacaacggcagccccagcggcgtgtaccagtgcgccatgaggcccaacttcaccatcaagggcagcttcctgaacggcagctgcggcagcgtgggcttcaacatcgactacgactgcgtgagcttctgctacatgcaccacatggagctgcccaccggcgtgcacgccggcaccgacctggagggcaacttctacggccccttcgtggacaggcagaccgcccaggccgccggcaccgacaccaccatcaccgtgaacgtgctggcctggctgtacgccgccgtgatcaacggcgacaggtggttcctgaacaggttcaccaccaccctgaacgacttcaacctggtggccatgaagtacaactacgagcccctgacccaggaccacgtggacatcctgggccccctgagcgcccagaccggcatcgccgtgctggacatgtgcgccagcctgaaggagctgctgcagaacggcatgaacggcaggaccatcctgggcagcgccctgctggaggacgagttcacccccttcgacgtggtgaggcagtgcagcggcgtgaccttccagtgatgactcgagctggtactgcatgcacgcaatgctagctgcccctttcccgtcctgggtaccccgagtctcccccgacctcgggtcccaggtatgctcccacctccacctgccccactcaccacctctgctagttccagacacctcccaagcacgcagcaatgcagctcaaaacgcttagcctagccacacccccacgggaaacagcagtgattaacctttagcaataaacgaaagtttaactaagctatactaaccccagggttggtcaatttcgtgccagccacaccctggagctagcaaaaaaaa

SEQ ID NO: 330 - DNA, 3751 bp, synthetic construct
  source 1..3751: mol_type = other DNA; note = Synthesized Vaccine Candidate 45
tagttattaatagtaatcaattacggggtcattagttcatagcccatatatggagttccgcgttacataacttacggtaaatggcccgcctggctgaccgcccaacgacccccgcccattgacgtcaataatgacgtatgttcccatagtaacgccaatagggactttccattgacgtcaatgggtggagtatttacggtaaactgcccacttggcagtacatcaagtgtatcatatgccaagtacgccccctattgacgtcaatgacggtaaatggcccgcctggcattatgcccagtacatgaccttatgggactttcctacttggcagtacatctacgtattagtcatcgctattaccatggtgatgcggttttggcagtacatcaatgggcgtggatagcggtttgactcacggggatttccaagtctccaccccattgacgtcaatgggagtttgttttggcaccaaaatcaacgggactttccaaaatgtcgtaacaactccgccccattgacgcaaatgggcggtaggcgtgtacggtgggaggtctatataagcagagctggtttagtgaaccgtcagatcgagaataaactagtattcttctggtccccacagactcagagagaacccgccaccatgagcgccgacgcccagagcttcctgaacagggtgtgcggcgtgagcgccgccaggctgaccccctgcggcaccggcaccagcaccgacgtggtgtacagggccttcgacatctacaacgacaaggtggccggcttcgccaagttcctgaagaccaactgctgcaggttccaggagaaggacgaggacgacaacctgatcgacagctacttcgtggtgaagaggcacaccttcagcaactaccagcacgaggagaccatctacaacctgctgaaggactgccccgccgtggccaagcacgacttcttcaagttcaggatcgacggcgacatggtgccccacatcagcaggcagaggctgaccaagtacaccatggccgacctggtgtacgccctgaggcacttcgacgagggcaactgcgacaccctgaaggagatcctggtgacctacaactgctgcgacgacgactacttcaacaagaaggactggtacgacttcgtggagaaccccgacatcctgagggtgtacgccaacctgggcgagagggtgaggcaggccctgctgaagaccgtgcagttctgcgacgccatgaggaacgccggcatcgtgggcgtgctgaccctggacaaccaggacctgaacggcaactggtacgacttcggcgacttcatccagaccacccccggcagcggcgtgcccgtggtggacagctactacagcctgctgatgcccatcctgaccctgaccagggccctgaccgccgagagccacgtggacaccgacctgaccaagccctacatcaagtgggacctgctgaagtacgacttcaccgaggagaggctgaagctgttcgacaggtacttcaagtactgggaccagacctaccaccccaactgcgtgaactgcctggacgacaggtgcatcctgcactgcgccaacttcaacgtgctgttcagcaccgtgttcccccccaccagcttcggccccctggtgaggaagatcttcgtggacggcgtgcccttcgtggtgagcaccggctaccacttcagggagctgggcgtggtgcacaaccaggacgtgaacctgcacagcagcaggctgagcttcaaggagctgctggtgtacgccgccgaccccgccatgcacgccgccagcggcaacctgctgctggacaagaggaccacctgcttcagcgtggccgccctgaccaacaacgtggccttccagaccgtgaagcccggcaacttcaacaaggacttctacgacttcgccgtgagcaagggcttcttcaaggagggcagcagcgtggagctgaagcacttcttcttcgcccaggacggcaacgccgccatcagcgactacgactactacaggtacaacctgcccaccatgtgcgacatcaggcagctgctgttcgtggtggaggtggtggacaagtacttcgactgctacgacggcggctgcatcaacgccaaccaggtgatcgtgaacaacctggacaagagcgccggcttccccttcaacaagtggggcaaggccaggctgtactacgacagcatgagctacgaggaccaggacgccctgttcgcctacaccaagaggaacgtgatccccaccatcacccagatgaacctgaagtacgccatcagcgccaagaacagggccaggaccgtggccggcgtgagcatctgcagcaccatgaccaacaggcagttccaccagaagctgctgaagagcatcgccgccaccaggggcgccaccgtggtgatcggcaccagcaagttctacggcggctggcacaacatgctgaagaccgtgtacagcgacgtggagaacccccacctgatgggctgggactaccccaagtgcgacagggccatgcccaacatgctgaggatcatggccagcctggtgctggccaggaagcacaccacctgctgcagcctgagccacaggttctacaggctggccaacgagtgcgcccaggtgctgagcgagatggtgatgtgcggcggcagcctgtacgtgaagcccggcggcaccagcagcggcgacgccaccaccgcctacgccaacagcgtgttcaacatctgccaggccgtgaccgccaacgtgaacgccctgctgagcaccgacggcaacaagatcgccgacaagtacgtgaggaacctgcagcacaggctgtacgagtgcctgtacaggaacagggacgtggacaccgacttcgtgaacgagttctacgcctacctgaggaagcacttcagcatgatgatcctgagcgacgacgccgtggtgtgcttcaacagcacctacgccagccagggcctggtggccagcatcaagaacttcaagagcgtgctgtactaccagaacaacgtgttcatgagcgaggccaagtgctggaccgagaccgacctgaccaagggcccccacgagttctgcagccagcacaccatgctggtgaagcagggcgacgactacgtgtacctgccctaccccgaccccagcaggatcctgggcgccggctgcttcgtggacgacatcgtgaagaccgacggcaccctgatgatcgagaggttcgtgagcctggccatcgacgcctaccccctgaccaagcaccccaaccaggagtacgccgacgtgttccacctgtacctgcagtacatcaggaagctgcacgacgagctgaccggccacatgctggacatgtacagcgtgatgctgaccaacgacaacaccagcaggtactgggagcccgagttctacgaggccatgtacaccccccacaccgtgctgcagtgatgactcgagctggtactgcatgcacgcaatgctagctgcccctttcccgtcctgggtaccccgagtctcccccgacctcgggtcccaggtatgctcccacctccacctgccccactcaccacctctgctagttccagacacctcccaagcacgcagcaatgcagctcaaaacgcttagcctagccacacccccacgggaaacagcagtgattaacctttagcaataaacgaaagtttaactaagctatactaaccccagggttggtcaatttcgtgccagccacaccctggagctagcaaaaaaaa

SEQ ID NO: 331 - DNA, 3353 bp, synthetic construct
  source 1..3353: mol_type = other DNA; note = Synthesized Vaccine Candidate 46
ctcgacattgattattgactagttattaatagtaatcaattacggggtcattagttcatagcccatatatggagttccgcgttacataacttacggtaaatggcccgcctggctgaccgcccaacgacccccgcccattgacgtcaataatgacgtatgttcccatagtaacgccaatagggactttccattgacgtcaatgggtggagtatttacggtaaactgcccacttggcagtacatcaagtgtatcatatgccaagtacgccccctattgacgtcaatgacggtaaatggcccgcctggcattatgcccagtacatgaccttatgggactttcctacttggcagtacatctacgtattagtcatcgctattaccatggtcgaggtgagccccacgttctgcttcactctccccatctcccccccctccccacccccaattttgtatttatttattttttaattattttgtgcagcgatgggggcggggggggggggggggcgcgcgccaggcggggcggggcggggcgaggggcggggcggggcgaggcggagaggtgcggcggcagccaatcagagcggcgcgctccgaaagtttccttttatggcgaggcggcggcggcggcggccctataaaaagcgaagcgcgcggcgggcgggagtcgctgcgcgctgccttcgccccgtgccccgctccgccgccgcctcgcgccgcccgccccggctctgactgaccgcgttactcccacaggtgagcgggcgggacggcccttctcctccgggctgtaattagcgcttggtttaatgacggcttgtttcttttctgtggctgcgtgaaagccttgaggggctccgggagggccctttgtgcggggggagcggctcggggggtgcgtgcgtgtgtgtgtgcgtggggagcgccgcgtgcggctccgcgctgcccggcggctgtgagcgctgcgggcgcggcgcggggctttgtgcgctccgcagtgtgcgcgaggggagcgcggccgggggcggtgccccgcggtgcggggggggctgcgaggggaacaaaggctgcgtgcggggtgtgtgcgtgggggggtgagcagggggtgtgggcgcgtcggtcgggctgcaaccccccctgcacccccctccccgagttgctgagcacggcccggcttcgggtgcggggctccgtacggggcgtggcgcggggctcgccgtgccgggcggggggtggcggcaggtgggggtgccgggcggggcggggccgcctcgggccggggagggctcgggggaggggcgcggcggcccccggagcgccggcggctgtcgaggcgcggcgagccgcagccattgccttttatggtaatcgtgcgagagggcgcagggacttcctttgtcccaaatctgtgcggagccgaaatctgggaggcgccgccgcaccccctctagcgggcgcggggcgaagcggtgcggcgccggcaggaaggaaatgggcggggagggccttcgtgcgtcgccgcgccgccgtccccttctccctctccagcctcggggctgtccgcggggggacggctgccttcgggggggacggggcagggcggggttcggcttctggcgtgtgaccggcggctctagagcctctgctaaccatgttcatgccttcttctttttcctacagctcctgggcaacgtgctggttattgtgctgtctcatcattttggcaaagaattggagaataaactagtattcttctggtccccacagactcagagagaacccgccaccatgagcgacaacggcccccagaaccagaggaacgcccccaggatcaccttcggcggccccagcgacagcaccggcagcaaccagaacggcgagaggagcggcgccaggagcaagcagaggaggccccagggcctgcccaacaacaccgccagctggttcaccgccctgacccagcacggcaaggaggacctgaagttccccaggggccagggcgtgcccatcaacaccaacagcagccccgacgaccagatcggctactacaggagggccaccaggaggatcaggggcggcgacggcaagatgaaggacctgagccccaggtggtacttctactacctgggcaccggccccgaggccggcctgccctacggcgccaacaaggacggcatcatctgggtggccaccgagggcgccctgaacacccccaaggaccacatcggcaccaggaaccccgccaacaacgccgccatcgtgctgcagctgccccagggcaccaccctgcccaagggcttctacgccgagggcagcaggggcggcagccaggccagcagcaggagcagcagcaggagcaggaacagcagcaggaacagcacccccggcagcagcaggggcaccagccccgccaggatggccggcaacggcggcgacgccgccctggccctgctgctgctggacaggctgaaccagctggagagcaagatgagcggcaagggccagcagcagcagggccagaccgtgaccaagaagagcgccgccgaggccagcaagaagcccaggcagaagaggaccgccaccaaggcctacaacgtgacccaggccttcggcaggaggggccccgagcagacccagggcaacttcggcgaccaggagctgatcaggcagggcaccgactacaagcactggccccagatcgcccagttcgcccccagcgccagcgccttcttcggcatgagcaggatcggcatggaggtgacccccagcggcacctggctgacctacaccggcgccatcaagctggacgacaaggaccccaacttcaaggaccaggtgatcctgctgaacaagcacatcgacgcctacaagaccttcccccccaccgagcccaagaaggacaagaagaagaaggccgacgagacccaggccctgccccagaggcagaagaagcagcagaccgtgaccctgctgcccgccgccgacctggacgacttcagcaagcagctgcagcagagcatgagcagcgccgacagcacccaggcctgatgactcgagctggtactgcatgcacgcaatgctagctgcccctttcccgtcctgggtaccccgagtctcccccgacctcgggtcccaggtatgctcccacctccacctgccccactcaccacctctgctagttccagacacctcccaagcacgcagcaatgcagctcaaaacgcttagcctagccacacccccacgggaaacagcagtgattaacctttagcaataaacgaaagtttaactaagctatactaaccccagggttggtcaatttcgtgccagccacaccctggagctagcaaaaaaaa

SEQ ID NO: 332 - DNA, 5783 bp, synthetic construct
  source 1..5783: mol_type = other DNA; note = Synthesized Vaccine Candidate 47
ctcgacattgattattgactagttattaatagtaatcaattacggggtcattagttcatagcccatatatggagttccgcgttacataacttacggtaaatggcccgcctggctgaccgcccaacgacccccgcccattgacgtcaataatgacgtatgttcccatagtaacgccaatagggactttccattgacgtcaatgggtggagtatttacggtaaactgcccacttggcagtacatcaagtgtatcatatgccaagtacgccccctattgacgtcaatgacggtaaatggcccgcctggcattatgcccagtacatgaccttatgggactttcctacttggcagtacatctacgtattagtcatcgctattaccatggtcgaggtgagccccacgttctgcttcactctccccatctcccccccctccccacccccaattttgtatttatttattttttaattattttgtgcagcgatgggggcggggggggggggggggcgcgcgccaggcggggcggggcggggcgaggggcggggcggggcgaggcggagaggtgcggcggcagccaatcagagcggcgcgctccgaaagtttccttttatggcgaggcggcggcggcggcggccctataaaaagcgaagcgcgcggcgggcgggagtcgctgcgcgctgccttcgccccgtgccccgctccgccgccgcctcgcgccgcccgccccggctctgactgaccgcgttactcccacaggtgagcgggcgggacggcccttctcctccgggctgtaattagcgcttggtttaatgacggcttgtttcttttctgtggctgcgtgaaagccttgaggggctccgggagggccctttgtgcggggggagcggctcggggggtgcgtgcgtgtgtgtgtgcgtggggagcgccgcgtgcggctccgcgctgcccggcggctgtgagcgctgcgggcgcggcgcggggctttgtgcgctccgcagtgtgcgcgaggggagcgcggccgggggcggtgccccgcggtgcggggggggctgcgaggggaacaaaggctgcgtgcggggtgtgtgcgtgggggggtgagcagggggtgtgggcgcgtcggtcgggctgcaaccccccctgcacccccctccccgagttgctgagcacggcccggcttcgggtgcggggctccgtacggggcgtggcgcggggctcgccgtgccgggcggggggtggcggcaggtgggggtgccgggcggggcggggccgcctcgggccggggagggctcgggggaggggcgcggcggcccccggagcgccggcggctgtcgaggcgcggcgagccgcagccattgccttttatggtaatcgtgcgagagggcgcagggacttcctttgtcccaaatctgtgcggagccgaaatctgggaggcgccgccgcaccccctctagcgggcgcggggcgaagcggtgcggcgccggcaggaaggaaatgggcggggagggccttcgtgcgtcgccgcgccgccgtccccttctccctctccagcctcggggctgtccgcggggggacggctgccttcgggggggacggggcagggcggggttcggcttctggcgtgtgaccggcggctctagagcctctgctaaccatgttcatgccttcttctttttcctacagctcctgggcaacgtgctggttattgtgctgtctcatcattttggcaaagaattggagaataaactagtattcttctggtccccacagactcagagagaacccgccaccatggaccaggaaccccgcctggaggaaggccgtgttcatcagcccctacaacagccagaacgccgtggccagcaagatcctgggcctgcccacccagaccgtggacagcagccagggcagcgagtacgactacgtgatcttcacccagaccaccgagaccgcccacagctgcaacgtgaacaggttcaacgtggccatcaccagggccaaggtgggcatcctgtgcatcatgagcgacagggacctgtacgacaagctgcagttcaccagcctggagatccccaggaggaacgtggccaccctgcaggccgagaacgtgaccggcctgttcaaggactgcagcaaggtgatcaccggcctgcaccccacccaggcccccacccacctgagcgtggacaccaagttcaagaccgagggcctgtgcgtggacatccccggcatccccaaggacatgacctacaggaggctgatcagcatgatgggcttcaagatgaactaccaggtgaacggctaccccaacatgttcatcaccagggaggaggccatcaggcacgtgagggcctggatcggcttcgacgtggagggctgccacgccaccagggaggccgtgggcaccaacctgcccctgcagctgggcttcagcaccggcgtgaacctggtggccgtgcccaccggctacgtggacacccccaacaacaccgacttcagcagggtgagcgccaagcccccccccggcgaccagttcaagcacctgatccccctgatgtacaagggcctgccctggaacgtggtgaggatcaagatcgtgcagatgctgagcgacaccctgaagaacctgagcgacagggtggtgttcgtgctgtgggcccacggcttcgagctgaccagcatgaagtacttcgtgaagatcggccccgagaggacctgctgcctgtgcgacaggagggccacctgcttcagcaccgccagcgacacctacgcctgctggcaccacagcatcggcttcgactacgtgtacaaccccttcatgatcgacgtgcagcagtggggcttcaccggcaacctgcagagcaaccacgacctgtactgccaggtgcacggcaacgcccacgtggccagctgcgacgccatcatgaccaggtgcctggccgtgcacgagtgcttcgtgaagagggtggactggaccatcgagtaccccatcatcggcgacgagctgaagatcaacgccgcctgcaggaaggtgcagcacatggtggtgaaggccgccctgctggccgacaagttccccgtgctgcacgacatcggcaaccccaaggccatcaagtgcgtgccccaggccgacgtggagtggaagttctacgacgcccagccctgcagcgacaaggcctacaagatcgaggagctgttctacagctacgccacccacagcgacaagttcaccgacggcgtgtgcctgttctggaactgcaacgtggacaggtaccccgccaacagcatcgtgtgcaggttcgacaccagggtgctgagcaacctgaacctgcccggctgcgacggcggcagcctgtacgtgaacaagcacgccttccacacccccgccttcgacaagagcgccttcgtgaacctgaagcagctgcccttcttctactacagcgacagcccctgcgagagccacggcaagcaggtggtgagcgacatcgactacgtgcccctgaagagcgccacctgcatcaccaggtgcaacctgggcggcgccgtgtgcaggcaccacgccaacgagtacaggctgtacctggacgcctacaacatgatgatcagcgccggcttcagcctgtgggtgtacaagcagttcgacacctacaacctgtggaacaccttcaccaggctgcagagcctggagaacgtggccttcaacgtggtgaacaagggccacttcgacggccagcagggcgaggtgcccgtgagcatcatcaacaacaccgtgtacaccaaggtggacggcgtggacgtggagctgttcgagaacaagaccaccctgcccgtgaacgtggccttcgagctgtgggccaagaggaacatcaagcccgtgcccgaggtgaagatcctgaacaacctgggcgtggacatcgccgccaacaccgtgatctgggactacaagagggacgcccccgcccacatcagcaccatcggcgtgtgcagcatgaccgacatcgccaagaagcccaccgagaccatctgcgcccccctgaccgtgttcttcgacggcagggtggacggccaggtggacctgttcaggaacgccaggaacggcgtgctgatcaccgagggcagcgtgaagggcctgcagcccagcgtgggccccaagcaggccagcctgaacggcgtgaccctgatcggcgaggccgtgaagacccagttcaactactacaagaaggtggacggcgtggtgcagcagctgcccgagacctacttcacccagagcaggaacctgcaggagttcaagcccaggagccagatggagatcgacttcctggagctggccatggacgagttcatcgagaggtacaagctggagggctacgccttcgagcacatcgtgtacggcgacttcagccacagccagctgggcggcctgcacctgctgatcggcctggccaagaggttcaaggagagccccttcgagctggaggacttcatccccatggacagcaccgtgaagaactacttcatcaccgacgcccagaccggcagcagcaagtgcgtgtgcagcgtgatcgacctgctgctggacgacttcgtggagatcatcaagagccaggacctgagcgtggtgagcaaggtggtgaaggtgaccatcgactacaccgagatcagcttcatgctgtggtgcaaggacggccacgtggagaccttctaccccaagctgcagagcagccaggcctggcagcccggcgtggccatgcccaacctgtacaagatgcagaggatgctgctggagaagtgcgacctgcagaactacggcgacagcgccaccctgcccaagggcatcatgatgaacgtggccaagtacacccagctgtgccagtacctgaacaccctgaccctggccgtgccctacaacatgagggtgatccacttcggcgccggcagcgacaagggcgtggcccccggcaccgccgtgctgaggcagtggctgcccaccggcaccctgctggtggacagcgacctgaacgacttcgtgagcgacgccgacagcaccctgatcggcgactgcgccaccgtgcacaccgccaacaagtgggacctgatcatcagcgacatgtacgaccccaagaccaagaacgtgaccaaggagaacgacagcaaggagggcttcttcacctacatctgcggcttcatccagcagaagctggccctgggcggcagcgtggccatcaagatcaccgagcacagctggaacgccgacctgtacaagctgatgggccacttcgcctggtggaccgccttcgtgaccaacgtgaacgccagcagcagcgaggccttcctgatcggctgcaactacctgggcaagcccagggagcagatcgacggctacgtgatgcacgccaactacatcttctggaggaacaccaaccccatccagctgagcagctacagcctgttcgacatgagcaagttccccctgaagcttgatgactcgagctggtactgcatgcacgcaatgctagctgcccctttcccgtcctgggtaccccgagtctcccccgacctcgggtcccaggtatgctcccacctccacctgccccactcaccacctctgctagttccagacacctcccaagcacgcagcaatgcagctcaaaacgcttagcctagccacacccccacgggaaacagcagtgattaacctttagcaataaacgaaagtttaactaagctatactaaccccagggttggtcaatttcgtgccagccacaccctggagctagcaaaaaaaa

SEQ ID NO: 333 - DNA, 2321 bp, synthetic construct
  source 1..2321: mol_type = other DNA; note = Synthesized Vaccine Candidate 48
ctcgacattgattattgactagttattaatagtaatcaattacggggtcattagttcatagcccatatatggagttccgcgttacataacttacggtaaatggcccgcctggctgaccgcccaacgacccccgcccattgacgtcaataatgacgtatgttcccatagtaacgccaatagggactttccattgacgtcaatgggtggagtatttacggtaaactgcccacttggcagtacatcaagtgtatcatatgccaagtacgccccctattgacgtcaatgacggtaaatggcccgcctggcattatgcccagtacatgaccttatgggactttcctacttggcagtacatctacgtattagtcatcgctattaccatggtcgaggtgagccccacgttctgcttcactctccccatctcccccccctccccacccccaattttgtatttatttattttttaattattttgtgcagcgatgggggcggggggggggggggggcgcgcgccaggcggggcggggcggggcgaggggcggggcggggcgaggcggagaggtgcggcggcagccaatcagagcggcgcgctccgaaagtttccttttatggcgaggcggcggcggcggcggccctataaaaagcgaagcgcgcggcgggcgggagtcgctgcgcgctgccttcgccccgtgccccgctccgccgccgcctcgcgccgcccgccccggctctgactgaccgcgttactcccacaggtgagcgggcgggacggcccttctcctccgggctgtaattagcgcttggtttaatgacggcttgtttcttttctgtggctgcgtgaaagccttgaggggctccgggagggccctttgtgcggggggagcggctcggggggtgcgtgcgtgtgtgtgtgcgtggggagcgccgcgtgcggctccgcgctgcccggcggctgtgagcgctgcgggcgcggcgcggggctttgtgcgctccgcagtgtgcgcgaggggagcgcggccgggggcggtgccccgcggtgcggggggggctgcgaggggaacaaaggctgcgtgcggggtgtgtgcgtgggggggtgagcagggggtgtgggcgcgtcggtcgggctgcaaccccccctgcacccccctccccgagttgctgagcacggcccggcttcgggtgcggggctccgtacggggcgtggcgcggggctcgccgtgccgggcggggggtggcggcaggtgggggtgccgggcggggcggggccgcctcgggccggggagggctcgggggaggggcgcggcggcccccggagcgccggcggctgtcgaggcgcggcgagccgcagccattgccttttatggtaatcgtgcgagagggcgcagggacttcctttgtcccaaatctgtgcggagccgaaatctgggaggcgccgccgcaccccctctagcgggcgcggggcgaagcggtgcggcgccggcaggaaggaaatgggcggggagggccttcgtgcgtcgccgcgccgccgtccccttctccctctccagcctcggggctgtccgcggggggacggctgccttcgggggggacggggcagggcggggttcggcttctggcgtgtgaccggcggctctagagcctctgctaaccatgttcatgccttcttctttttcctacagctcctgggcaacgtgctggttattgtgctgtctcatcattttggcaaagaattggagaataaactagtattcttctggtccccacagactcagagagaacccgccaccatgtacagcttcgtgagcgaggagaccggcaccctgatcgtgaacagcgtgctgctgttcctggccttcgtggtgttcctgctggtgaccctggccatcctgaccgccctgaggctgtgcgcctactgctgcaacatcgtgaacgtgagcctggtgaagcccagcttctacgtgtacagcagggtgaagaacctgaacagcagcagggtgcccgacctgctggtgtgatgactcgagctggtactgcatgcacgcaatgctagctgcccctttcccgtcctgggtaccccgagtctcccccgacctcgggtcccaggtatgctcccacctccacctgccccactcaccacctctgctagttccagacacctcccaagcacgcagcaatgcagctcaaaacgcttagcctagccacacccccacgggaaacagcagtgattaacctttagcaataaacgaaagtttaactaagctatactaaccccagggttggtcaatttcgtgccagccacaccctggagctagcaaaaaaaa

SEQ ID NO: 334 - DNA, 2762 bp, synthetic construct
  source 1..2762: mol_type = other DNA; note = Synthesized Vaccine Candidate 49
ctcgacattgattattgactagttattaatagtaatcaattacggggtcattagttcatagcccatatatggagttccgcgttacataacttacggtaaatggcccgcctggctgaccgcccaacgacccccgcccattgacgtcaataatgacgtatgttcccatagtaacgccaatagggactttccattgacgtcaatgggtggagtatttacggtaaactgcccacttggcagtacatcaagtgtatcatatgccaagtacgccccctattgacgtcaatgacggtaaatggcccgcctggcattatgcccagtacatgaccttatgggactttcctacttggcagtacatctacgtattagtcatcgctattaccatggtcgaggtgagccccacgttctgcttcactctccccatctcccccccctccccacccccaattttgtatttatttattttttaattattttgtgcagcgatgggggcggggggggggggggggcgcgcgccaggcggggcggggcggggcgaggggcggggcggggcgaggcggagaggtgcggcggcagccaatcagagcggcgcgctccgaaagtttccttttatggcgaggcggcggcggcggcggccctataaaaagcgaagcgcgcggcgggcgggagtcgctgcgcgctgccttcgccccgtgccccgctccgccgccgcctcgcgccgcccgccccggctctgactgaccgcgttactcccacaggtgagcgggcgggacggcccttctcctccgggctgtaattagcgcttggtttaatgacggcttgtttcttttctgtggctgcgtgaaagccttgaggggctccgggagggccctttgtgcggggggagcggctcggggggtgcgtgcgtgtgtgtgtgcgtggggagcgccgcgtgcggctccgcgctgcccggcggctgtgagcgctgcgggcgcggcgcggggctttgtgcgctccgcagtgtgcgcgaggggagcgcggccgggggcggtgccccgcggtgcggggggggctgcgaggggaacaaaggctgcgtgcggggtgtgtgcgtgggggggtgagcagggggtgtgggcgcgtcggtcgggctgcaaccccccctgcacccccctccccgagttgctgagcacggcccggcttcgggtgcggggctccgtacggggcgtggcgcggggctcgccgtgccgggcggggggtggcggcaggtgggggtgccgggcggggcggggccgcctcgggccggggagggctcgggggaggggcgcggcggcccccggagcgccggcggctgtcgaggcgcggcgagccgcagccattgccttttatggtaatcgtgcgagagggcgcagggacttcctttgtcccaaatctgtgcggagccgaaatctgggaggcgccgccgcaccccctctagcgggcgcggggcgaagcggtgcggcgccggcaggaaggaaatgggcggggagggccttcgtgcgtcgccgcgccgccgtccccttctccctctccagcctcggggctgtccgcggggggacggctgccttcgggggggacggggcagggcggggttcggcttctggcgtgtgaccggcggctctagagcctctgctaaccatgttcatgccttcttctttttcctacagctcctgggcaacgtgctggttattgtgctgtctcatcattttggcaaagaattggagaataaactagtattcttctggtccccacagactcagagagaacccgccaccatggccgacagcaacggcaccatcaccgtggaggagctgaagaagctgctggagcagtggaacctggtgatcggcttcctgttcctgacctggatctgcctgctgcagttcgcctacgccaacaggaacaggttcctgtacatcatcaagctgatcttcctgtggctgctgtggcccgtgaccctggcctgcttcgtgctggccgccgtgtacaggatcaactggatcaccggcggcatcgccatcgccatggcctgcctggtgggcctgatgtggctgagctacttcatcgccagcttcaggctgttcgccaggaccaggagcatgtggagcttcaaccccgagaccaacatcctgctgaacgtgcccctgcacggcaccatcctgaccaggcccctgctggagagcgagctggtgatcggcgccgtgatcctgaggggccacctgaggatcgccggccaccacctgggcaggtgcgacatcaaggacctgcccaaggagatcaccgtggccaccagcaggaccctgagctactacaagctgggcgccagccagagggtggccggcgacagcggcttcgccgcctacagcaggtacaggatcggcaactacaagctgaacaccgaccacagcagcagcagcgacaacatcgccctgctggtgcagtgatgactcgagctggtactgcatgcacgcaatgctagctgcccctttcccgtcctgggtaccccgagtctcccccgacctcgggtcccaggtatgctcccacctccacctgccccactcaccacctctgctagttccagacacctcccaagcacgcagcaatgcagctcaaaacgcttagcctagccacacccccacgggaaacagcagtgattaacctttagcaataaacgaaagtttaactaagctatactaaccccagggttggtcaatttcgtgccagccacaccctggagctagcaaaaaaaa

SEQ ID NO: 335 - DNA, 2183 bp, synthetic construct
  source 1..2183: mol_type = other DNA; note = Synthesized Vaccine Candidate 50
ctcgacattgattattgactagttattaatagtaatcaattacggggtcattagttcatagcccatatatggagttccgcgttacataacttacggtaaatggcccgcctggctgaccgcccaacgacccccgcccattgacgtcaataatgacgtatgttcccatagtaacgccaatagggactttccattgacgtcaatgggtggagtatttacggtaaactgcccacttggcagtacatcaagtgtatcatatgccaagtacgccccctattgacgtcaatgacggtaaatggcccgcctggcattatgcccagtacatgaccttatgggactttcctacttggcagtacatctacgtattagtcatcgctattaccatggtcgaggtgagccccacgttctgcttcactctccccatctcccccccctccccacccccaattttgtatttatttattttttaattattttgtgcagcgatgggggcggggggggggggggggcgcgcgccaggcggggcggggcggggcgaggggcggggcggggcgaggcggagaggtgcggcggcagccaatcagagcggcgcgctccgaaagtttccttttatggcgaggcggcggcggcggcggccctataaaaagcgaagcgcgcggcgggcgggagtcgctgcgcgctgccttcgccccgtgccccgctccgccgccgcctcgcgccgcccgccccggctctgactgaccgcgttactcccacaggtgagcgggcgggacggcccttctcctccgggctgtaattagcgcttggtttaatgacggcttgtttcttttctgtggctgcgtgaaagccttgaggggctccgggagggccctttgtgcggggggagcggctcggggggtgcgtgcgtgtgtgtgtgcgtggggagcgccgcgtgcggctccgcgctgcccggcggctgtgagcgctgcgggcgcggcgcggggctttgtgcgctccgcagtgtgcgcgaggggagcgcggccgggggcggtgccccgcggtgcggggggggctgcgaggggaacaaaggctgcgtgcggggtgtgtgcgtgggggggtgagcagggggtgtgggcgcgtcggtcgggctgcaaccccccctgcacccccctccccgagttgctgagcacggcccggcttcgggtgcggggctccgtacggggcgtggcgcggggctcgccgtgccgggcggggggtggcggcaggtgggggtgccgggcggggcggggccgcctcgggccggggagggctcgggggaggggcgcggcggcccccggagcgccggcggctgtcgaggcgcggcgagccgcagccattgccttttatggtaatcgtgcgagagggcgcagggacttcctttgtcccaaatctgtgcggagccgaaatctgggaggcgccgccgcaccccctctagcgggcgcggggcgaagcggtgcggcgccggcaggaaggaaatgggcggggagggccttcgtgcgtcgccgcgccgccgtccccttctccctctccagcctcggggctgtccgcggggggacggctgccttcgggggggacggggcagggcggggttcggcttctggcgtgtgaccggcggctctagagcctctgctaaccatgttcatgccttcttctttttcctacagctcctgggcaacgtgctggttattgtgctgtctcatcattttggcaaagaattggagaataaactagtattcttctggtccccacagactcagagagaacccgccaccatgaagatcatcctgttcctggccctgatcaccctggccacctgcgagctgtaccactaccaggagtgcgtgaggggcaccaccgtgtgatgactcgagctggtactgcatgcacgcaatgctagctgcccctttcccgtcctgggtaccccgagtctcccccgacctcgggtcccaggtatgctcccacctccacctgccccactcaccacctctgctagttccagacacctcccaagcacgcagcaatgcagctcaaaacgcttagcctagccacacccccacgggaaacagcagtgattaacctttagcaataaacgaaagtttaactaagctatactaaccccagggttggtcaatttcgtgccagccacaccctggagctagcaaaaaaaa

SEQ ID NO: 336 - DNA, 4385 bp, synthetic construct
  source 1..4385: mol_type = other DNA; note = Synthesized Vaccine Candidate 51
ctcgacattgattattgactagttattaatagtaatcaattacggggtcattagttcatagcccatatatggagttccgcgttacataacttacggtaaatggcccgcctggctgaccgcccaacgacccccgcccattgacgtcaataatgacgtatgttcccatagtaacgccaatagggactttccattgacgtcaatgggtggagtatttacggtaaactgcccacttggcagtacatcaagtgtatcatatgccaagtacgccccctattgacgtcaatgacggtaaatggcccgcctggcattatgcccagtacatgaccttatgggactttcctacttggcagtacatctacgtattagtcatcgctattaccatggtcgaggtgagccccacgttctgcttcactctccccatctcccccccctccccacccccaattttgtatttatttattttttaattattttgtgcagcgatgggggcggggggggggggggggcgcgcgccaggcggggcggggcggggcgaggggcggggcggggcgaggcggagaggtgcggcggcagccaatcagagcggcgcgctccgaaagtttccttttatggcgaggcggcggcggcggcggccctataaaaagcgaagcgcgcggcgggcgggagtcgctgcgcgctgccttcgccccgtgccccgctccgccgccgcctcgcgccgcccgccccggctctgactgaccgcgttactcccacaggtgagcgggcgggacggcccttctcctccgggctgtaattagcgcttggtttaatgacggcttgtttcttttctgtggctgcgtgaaagccttgaggggctccgggagggccctttgtgcggggggagcggctcggggggtgcgtgcgtgtgtgtgtgcgtggggagcgccgcgtgcggctccgcgctgcccggcggctgtgagcgctgcgggcgcggcgcggggctttgtgcgctccgcagtgtgcgcgaggggagcgcggccgggggcggtgccccgcggtgcggggggggctgcgaggggaacaaaggctgcgtgcggggtgtgtgcgtgggggggtgagcagggggtgtgggcgcgtcggtcgggctgcaaccccccctgcacccccctccccgagttgctgagcacggcccggcttcgggtgcggggctccgtacggggcgtggcgcggggctcgccgtgccgggcggggggtggcggcaggtgggggtgccgggcggggcggggccgcctcgggccggggagggctcgggggaggggcgcggcggcccccggagcgccggcggctgtcgaggcgcggcgagccgcagccattgccttttatggtaatcgtgcgagagggcgcagggacttcctttgtcccaaatctgtgcggagccgaaatctgggaggcgccgccgcaccccctctagcgggcgcggggcgaagcggtgcggcgccggcaggaaggaaatgggcggggagggccttcgtgcgtcgccgcgccgccgtccccttctccctctccagcctcggggctgtccgcggggggacggctgccttcgggggggacggggcagggcggggttcggcttctggcgtgtgaccggcggctctagagcctctgctaaccatgttcatgccttcttctttttcctacagctcctgggcaacgtgctggttattgtgctgtctcatcattttggcaaagaattggagaataaactagtattcttctggtccccacagactcagagagaacccgccaccatggcccccaccaaggtgaccttcggcgacgacaccgtgatcgaggtgcagggctacaagagcgtgaacatcaccttcgagctggacgagaggatcgacaaggtgctgaacgagaagtgcagcgcctacaccgtggagctgggcaccgaggtgaacgagttcgcctgcgtggtggccgacgccgtgatcaagaccctgcagcccgtgagcgagctgctgacccccctgggcatcgacctggacgagtggagcatggccacctactacctgttcgacgagagcggcgagttcaagctggccagccacatgtactgcagcttctacccccccgacgaggacgaggaggagggcgactgcgaggaggaggagttcgagcccagcacccagtacgagtacggcaccgaggacgactaccagggcaagcccctggagttcggcgccaccagcgccgccctgcagcccgaggaggagcaggaggaggactggctggacgacgacagccagcagaccgtgggccagcaggacggcagcgaggacaaccagaccaccaccatccagaccatcgtggaggtgcagccccagctggagatggagctgacccccgtggtgcagaccatcgaggtgaacagcttcagcggctacctgaagctgaccgacaacgtgtacatcaagaacgccgacatcgtggaggaggccaagaaggtgaagcccaccgtggtggtgaacgccgccaacgtgtacctgaagcacggcggcggcgtggccggcgccctgaacaaggccaccaacaacgccatgcaggtggagagcgacgactacatcgccaccaacggccccctgaaggtgggcggcagctgcgtgctgagcggccacaacctggccaagcactgcctgcacgtggtgggccccaacgtgaacaagggcgaggacatccagctgctgaagagcgcctacgagaacttcaaccagcacgaggtgctgctggcccccctgctgagcgccggcatcttcggcgccgaccccatccacagcctgagggtgtgcgtggacaccgtgaggaccaacgtgtacctggccgtgttcgacaagaacctgtacgacaagctggtgagcagcttcctggagatgaagagcgagaagcaggtggagcagaagatcgccgagatccccaaggaggaggtgaagcccttcatcaccgagagcaagcccagcgtggagcagaggaagcaggacgacaagaagatcaaggcctgcgtggaggaggtgaccaccaccctggaggagaccaagttcctgaccgagaacctgctgctgtacatcgacatcaacggcaacctgcaccccgacagcgccaccctggtgagcgacatcgacatcaccttcctgaagaaggacgccccctacatcgtgggcgacgtggtgcaggagggcgtgctgaccgccgtggtgatccccaccaagaaggccggcggcaccaccgagatgctggccaaggccctgaggaaggtgcccaccgacaactacatcaccacctaccccggccagggcctgaacggctacaccgtggaggaggccaagaccgtgctgaagaagtgcaagagcgccttctacatcctgcccagcatcatcagcaacgagaagcaggagatcctgggcaccgtgagctggaacctgagggagatgctggcccacgccgaggagaccaggaagctgatgcccgtgtgcgtggagaccaaggccatcgtgagcaccatccagaggaagtacaagggcatcaagatccaggagggcgtggtggactacggcgccaggttctacttctacaccagcaagaccaccgtggccagcctgatcaacaccctgaacgacctgaacgagaccctggtgaccatgcccctgggctacgtgacccacggcctgaacctggaggaggccgccaggtacatgaggagcctgaaggtgcccgccaccgtgagcgtgagcagccccgacgccgtgaccgcctacaacggctacctgaccagcagcagcaagacccccgaggagcacttcatcgagaccatcagcctggccggcagctacaaggactggagctacagcggccagagcacccagctgggcatcgagttcctgaagaggggcgacaagagcgtgtactacaccagcaaccccaccaccttccacctggacggcgaggtgatcaccttcgacaacctgaagaccctgctgagcctgagggaggtgaggaccatcaaggtgttcaccaccgtggacaacatcaacctgcactgatgactcgagctggtactgcatgcacgcaatgctagctgcccctttcccgtcctgggtaccccgagtctcccccgacctcgggtcccaggtatgctcccacctccacctgccccactcaccacctctgctagttccagacacctcccaagcacgcagcaatgcagctcaaaacgcttagcctagccacacccccacgggaaacagcagtgattaacctttagcaataaacgaaagtttaactaagctatactaaccccagggttggtcaatttcgtgccagccacaccctggagctagcaaaaaaaa

SEQ ID NO: 337 - DNA, 3017 bp, synthetic construct
  source 1..3017: mol_type = other DNA; note = Synthesized Vaccine Candidate 52
ctcgacattgattattgactagttattaatagtaatcaattacggggtcattagttcatagcccatatatggagttccgcgttacataacttacggtaaatggcccgcctggctgaccgcccaacgacccccgcccattgacgtcaataatgacgtatgttcccatagtaacgccaatagggactttccattgacgtcaatgggtggagtatttacggtaaactgcccacttggcagtacatcaagtgtatcatatgccaagtacgccccctattgacgtcaatgacggtaaatggcccgcctggcattatgcccagtacatgaccttatgggactttcctacttggcagtacatctacgtattagtcatcgctattaccatggtcgaggtgagccccacgttctgcttcactctccccatctcccccccctccccacccccaattttgtatttatttattttttaattattttgtgcagcgatgggggcggggggggggggggggcgcgcgccaggcggggcggggcggggcgaggggcggggcggggcgaggcggagaggtgcggcggcagccaatcagagcggcgcgctccgaaagtttccttttatggcgaggcggcggcggcggcggccctataaaaagcgaagcgcgcggcgggcgggagtcgctgcgcgctgccttcgccccgtgccccgctccgccgccgcctcgcgccgcccgccccggctctgactgaccgcgttactcccacaggtgagcgggcgggacggcccttctcctccgggctgtaattagcgcttggtttaatgacggcttgtttcttttctgtggctgcgtgaaagccttgaggggctccgggagggccctttgtgcggggggagcggctcggggggtgcgtgcgtgtgtgtgtgcgtggggagcgccgcgtgcggctccgcgctgcccggcggctgtgagcgctgcgggcgcggcgcggggctttgtgcgctccgcagtgtgcgcgaggggagcgcggccgggggcggtgccccgcggtgcggggggggctgcgaggggaacaaaggctgcgtgcggggtgtgtgcgtgggggggtgagcagggggtgtgggcgcgtcggtcgggctgcaaccccccctgcacccccctccccgagttgctgagcacggcccggcttcgggtgcggggctccgtacggggcgtggcgcggggctcgccgtgccgggcggggggtggcggcaggtgggggtgccgggcggggcggggccgcctcgggccggggagggctcgggggaggggcgcggcggcccccggagcgccggcggctgtcgaggcgcggcgagccgcagccattgccttttatggtaatcgtgcgagagggcgcagggacttcctttgtcccaaatctgtgcggagccgaaatctgggaggcgccgccgcaccccctctagcgggcgcggggcgaagcggtgcggcgccggcaggaaggaaatgggcggggagggccttcgtgcgtcgccgcgccgccgtccccttctccctctccagcctcggggctgtccgcggggggacggctgccttcgggggggacggggcagggcggggttcggcttctggcgtgtgaccggcggctctagagcctctgctaaccatgttcatgccttcttctttttcctacagctcctgggcaacgtgctggttattgtgctgtctcatcattttggcaaagaattggagaataaactagtattcttctggtccccacagactcagagagaacccgccaccatgagcggcttcaggaagatggccttccccagcggcaaggtggagggctgcatggtgcaggtgacctgcggcaccaccaccctgaacggcctgtggctggacgacgtggtgtactgccccaggcacgtgatctgcaccagcgaggacatgctgaaccccaactacgaggacctgctgatcaggaagagcaaccacaacttcctggtgcaggccggcaacgtgcagctgagggtgatcggccacagcatgcagaactgcgtgctgaagctgaaggtggacaccgccaaccccaagacccccaagtacaagttcgtgaggatccagcccggccagaccttcagcgtgctggcctgctacaacggcagccccagcggcgtgtaccagtgcgccatgaggcccaacttcaccatcaagggcagcttcctgaacggcagctgcggcagcgtgggcttcaacatcgactacgactgcgtgagcttctgctacatgcaccacatggagctgcccaccggcgtgcacgccggcaccgacctggagggcaacttctacggccccttcgtggacaggcagaccgcccaggccgccggcaccgacaccaccatcaccgtgaacgtgctggcctggctgtacgccgccgtgatcaacggcgacaggtggttcctgaacaggttcaccaccaccctgaacgacttcaacctggtggccatgaagtacaactacgagcccctgacccaggaccacgtggacatcctgggccccctgagcgcccagaccggcatcgccgtgctggacatgtgcgccagcctgaaggagctgctgcagaacggcatgaacggcaggaccatcctgggcagcgccctgctggaggacgagttcacccccttcgacgtggtgaggcagtgcagcggcgtgaccttccagtgatgactcgagctggtactgcatgcacgcaatgctagctgcccctttcccgtcctgggtaccccgagtctcccccgacctcgggtcccaggtatgctcccacctccacctgccccactcaccacctctgctagttccagacacctcccaagcacgcagcaatgcagctcaaaacgcttagcctagccacacccccacgggaaacagcagtgattaacctttagcaataaacgaaagtttaactaagctatactaaccccagggttggtcaatttcgtgccagccacaccctggagctagcaaaaaaaa

SEQ ID NO: 338 - DNA, 4895 bp, synthetic construct
  source 1..4895: mol_type = other DNA; note = Synthesized Vaccine Candidate 53
ctcgacattgattattgactagttattaatagtaatcaattacggggtcattagttcatagcccatatatggagttccgcgttacataacttacggtaaatggcccgcctggctgaccgcccaacgacccccgcccattgacgtcaataatgacgtatgttcccatagtaacgccaatagggactttccattgacgtcaatgggtggagtatttacggtaaactgcccacttggcagtacatcaagtgtatcatatgccaagtacgccccctattgacgtcaatgacggtaaatggcccgcctggcattatgcccagtacatgaccttatgggactttcctacttggcagtacatctacgtattagtcatcgctattaccatggtcgaggtgagccccacgttctgcttcactctccccatctcccccccctccccacccccaattttgtatttatttattttttaattattttgtgcagcgatgggggcggggggggggggggggcgcgcgccaggcggggcggggcggggcgaggggcggggcggggcgaggcggagaggtgcggcggcagccaatcagagcggcgcgctccgaaagtttccttttatggcgaggcggcggcggcggcggccctataaaaagcgaagcgcgcggcgggcgggagtcgctgcgcgctgccttcgccccgtgccccgctccgccgccgcctcgcgccgcccgccccggctctgactgaccgcgttactcccacaggtgagcgggcgggacggcccttctcctccgggctgtaattagcgcttggtttaatgacggcttgtttcttttctgtggctgcgtgaaagccttgaggggctccgggagggccctttgtgcggggggagcggctcggggggtgcgtgcgtgtgtgtgtgcgtggggagcgccgcgtgcggctccgcgctgcccggcggctgtgagcgctgcgggcgcggcgcggggctttgtgcgctccgcagtgtgcgcgaggggagcgcggccgggggcggtgccccgcggtgcggggggggctgcgaggggaacaaaggctgcgtgcggggtgtgtgcgtgggggggtgagcagggggtgtgggcgcgtcggtcgggctgcaaccccccctgcacccccctccccgagttgctgagcacggcccggcttcgggtgcggggctccgtacggggcgtggcgcggggctcgccgtgccgggcggggggtggcggcaggtgggggtgccgggcggggcggggccgcctcgggccggggagggctcgggggaggggcgcggcggcccccggagcgccggcggctgtcgaggcgcggcgagccgcagccattgccttttatggtaatcgtgcgagagggcgcagggacttcctttgtcccaaatctgtgcggagccgaaatctgggaggcgccgccgcaccccctctagcgggcgcggggcgaagcggtgcggcgccggcaggaaggaaatgggcggggagggccttcgtgcgtcgccgcgccgccgtccccttctccctctccagcctcggggctgtccgcggggggacggctgccttcgggggggacggggcagggcggggttcggcttctggcgtgtgaccggcggctctagagcctctgctaaccatgttcatgccttcttctttttcctacagctcctgggcaacgtgctggttattgtgctgtctcatcattttggcaaagaattggagaataaactagtattcttctggtccccacagactcagagagaacccgccaccatgagcgccgacgcccagagcttcctgaacagggtgtgcggcgtgagcgccgccaggctgaccccctgcggcaccggcaccagcaccgacgtggtgtacagggccttcgacatctacaacgacaaggtggccggcttcgccaagttcctgaagaccaactgctgcaggttccaggagaaggacgaggacgacaacctgatcgacagctacttcgtggtgaagaggcacaccttcagcaactaccagcacgaggagaccatctacaacctgctgaaggactgccccgccgtggccaagcacgacttcttcaagttcaggatcgacggcgacatggtgccccacatcagcaggcagaggctgaccaagtacaccatggccgacctggtgtacgccctgaggcacttcgacgagggcaactgcgacaccctgaaggagatcctggtgacctacaactgctgcgacgacgactacttcaacaagaaggactggtacgacttcgtggagaaccccgacatcctgagggtgtacgccaacctgggcgagagggtgaggcaggccctgctgaagaccgtgcagttctgcgacgccatgaggaacgccggcatcgtgggcgtgctgaccctggacaaccaggacctgaacggcaactggtacgacttcggcgacttcatccagaccacccccggcagcggcgtgcccgtggtggacagctactacagcctgctgatgcccatcctgaccctgaccagggccctgaccgccgagagccacgtggacaccgacctgaccaagccctacatcaagtgggacctgctgaagtacgacttcaccgaggagaggctgaagctgttcgacaggtacttcaagtactgggaccagacctaccaccccaactgcgtgaactgcctggacgacaggtgcatcctgcactgcgccaacttcaacgtgctgttcagcaccgtgttcccccccaccagcttcggccccctggtgaggaagatcttcgtggacggcgtgcccttcgtggtgagcaccggctaccacttcagggagctgggcgtggtgcacaaccaggacgtgaacctgcacagcagcaggctgagcttcaaggagctgctggtgtacgccgccgaccccgccatgcacgccgccagcggcaacctgctgctggacaagaggaccacctgcttcagcgtggccgccctgaccaacaacgtggccttccagaccgtgaagcccggcaacttcaacaaggacttctacgacttcgccgtgagcaagggcttcttcaaggagggcagcagcgtggagctgaagcacttcttcttcgcccaggacggcaacgccgccatcagcgactacgactactacaggtacaacctgcccaccatgtgcgacatcaggcagctgctgttcgtggtggaggtggtggacaagtacttcgactgctacgacggcggctgcatcaacgccaaccaggtgatcgtgaacaacctggacaagagcgccggcttccccttcaacaagtggggcaaggccaggctgtactacgacagcatgagctacgaggaccaggacgccctgttcgcctacaccaagaggaacgtgatccccaccatcacccagatgaacctgaagtacgccatcagcgccaagaacagggccaggaccgtggccggcgtgagcatctgcagcaccatgaccaacaggcagttccaccagaagctgctgaagagcatcgccgccaccaggggcgccaccgtggtgatcggcaccagcaagttctacggcggctggcacaacatgctgaagaccgtgtacagcgacgtggagaacccccacctgatgggctgggactaccccaagtgcgacagggccatgcccaacatgctgaggatcatggccagcctggtgctggccaggaagcacaccacctgctgcagcctgagccacaggttctacaggctggccaacgagtgcgcccaggtgctgagcgagatggtgatgtgcggcggcagcctgtacgtgaagcccggcggcaccagcagcggcgacgccaccaccgcctacgccaacagcgtgttcaacatctgccaggccgtgaccgccaacgtgaacgccctgctgagcaccgacggcaacaagatcgccgacaagtacgtgaggaacctgcagcacaggctgtacgagtgcctgtacaggaacagggacgtggacaccgacttcgtgaacgagttctacgcctacctgaggaagcacttcagcatgatgatcctgagcgacgacgccgtggtgtgcttcaacagcacctacgccagccagggcctggtggccagcatcaagaacttcaagagcgtgctgtactaccagaacaacgtgttcatgagcgaggccaagtgctggaccgagaccgacctgaccaagggcccccacgagttctgcagccagcacaccatgctggtgaagcagggcgacgactacgtgtacctgccctaccccgaccccagcaggatcctgggcgccggctgcttcgtggacgacatcgtgaagaccgacggcaccctgatgatcgagaggttcgtgagcctggccatcgacgcctaccccctgaccaagcaccccaaccaggagtacgccgacgtgttccacctgtacctgcagtacatcaggaagctgcacgacgagctgaccggccacatgctggacatgtacagcgtgatgctgaccaacgacaacaccagcaggtactgggagcccgagttctacgaggccatgtacaccccccacaccgtgctgcagtgatgactcgagctggtactgcatgcacgcaatgctagctgcccctttcccgtcctgggtaccccgagtctcccccgacctcgggtcccaggtatgctcccacctccacctgccccactcaccacctctgctagttccagacacctcccaagcacgcagcaatgcagctcaaaacgcttagcctagccacacccccacgggaaacagcagtgattaacctttagcaataaacgaaagtttaactaagctatactaaccccagggttggtcaatttcgtgccagccacaccctggagctagcaaaaaaaa

SEQ ID NO: 339 - DNA, 5148 bp, synthetic construct
  source 1..5148: mol_type = other DNA; note = Synthesized Vaccine Candidate 54
atgttcgtgttcctggtgctgctgcccctggtgagcagccagtgcgtgaacctgaccaccaggacccagctgccccccgcctacaccaacagcttcaccaggggcgtgtactaccccgacaaggtgttcaggagcagcgtgctgcacagcacccaggacctgttcctgcccttcttcagcaacgtgacctggttccacgccatccacgtgagcggcaccaacggcaccaagaggttcgacaaccccgtgctgcccttcaacgacggcgtgtacttcgccagcaccgagaagagcaacatcatcaggggctggatcttcggcaccaccctggacagcaagacccagagcctgctgatcgtgaacaacgccaccaacgtggtgatcaaggtgtgcgagttccagttctgcaacgaccccttcctgggcgtgtactaccacaagaacaacaagagctggatggagagcgagttcagggtgtacagcagcgccaacaactgcaccttcgagtacgtgagccagcccttcctgatggacctggagggcaagcagggcaacttcaagaacctgagggagttcgtgttcaagaacatcgacggctacttcaagatctacagcaagcacacccccatcaacctggtgagggacctgccccagggcttcagcgccctggagcccctggtggacctgcccatcggcatcaacatcaccaggttccagaccctgctggccctgcacaggagctacctgacccccggcgacagcagcagcggctggaccgccggcgccgccgcctactacgtgggctacctgcagcccaggaccttcctgctgaagtacaacgagaacggcaccatcaccgacgccgtggactgcgccctggaccccctgagcgagaccaagtgcaccctgaagagcttcaccgtggagaagggcatctaccagaccagcaacttcagggtgcagcccaccgagagcatcgtgaggttccccaacatcaccaacctgtgccccttcggcgaggtgttcaacgccaccaggttcgccagcgtgtacgcctggaacaggaagaggatcagcaactgcgtggccgactacagcgtgctgtacaacagcgccagcttcagcaccttcaagtgctacggcgtgagccccaccaagctgaacgacctgtgcttcaccaacgtgtacgccgacagcttcgtgatcaggggcgacgaggtgaggcagatcgcccccggccagaccggcaagatcgccgactacaactacaagctgcccgacgacttcaccggctgcgtgatcgcctggaacagcaacaacctggacagcaaggtgggcggcaactacaactacctgtacaggctgttcaggaagagcaacctgaagcccttcgagagggacatcagcaccgagatctaccaggccggcagcaccccctgcaacggcgtggagggcttcaactgctacttccccctgcagagctacggcttccagcccaccaacggcgtgggctaccagccctacagggtggtggtgctgagcttcgagctgctgcacgcccccgccaccgtgtgcggccccaagaagagcaccaacctggtgaagaacaagtgcgtgaacttcaacttcaacggcctgaccggcaccggcgtgctgaccgagagcaacaagaagttcctgcccttccagcagttcggcagggacatcgccgacaccaccgacgccgtgagggacccccagaccctggagatcctggacatcaccccctgcagcttcggcggcgtgagcgtgatcacccccggcaccaacaccagcaaccaggtggccgtgctgtaccaggacgtgaactgcaccgaggtgcccgtggccatccacgccgaccagctgacccccacctggagggtgtacagcaccggcagcaacgtgttccagaccagggccggctgcctgatcggcgccgagcacgtgaacaacagctacgagtgcgacatccccatcggcgccggcatctgcgccagctaccagacccagaccaacagccccggcagcgccagcagcgtggccagccagagcatcatcgcctacaccatgagcctgggcgccgagaacagcgtggcctacagcaacaacagcatcgccatccccaccaacttcaccatcagcgtgaccaccgagatcctgcccgtgagcatgaccaagaccagcgtggactgcaccatgtacatctgcggcgacagcaccgagtgcagcaacctgctgctgcagtacggcagcttctgcacccagctgaacagggccctgaccggcatcgccgtggagcaggacaagaacacccaggaggtgttcgcccaggtgaagcagatctacaagaccccccccatcaaggacttcggcggcttcaacttcagccagatcctgcccgaccccagcaagcccagcaagaggagccccatcgaggacctgctgttcaacaaggtgaccctggccgacgccggcttcatcaagcagtacggcgactgcctgggcgacatcgccgccagggacctgatctgcgcccagaagttcaacggcctgaccgtgctgccccccctgctgaccgacgagatgatcgcccagtacaccagcgccctgctggccggcaccatcaccagcggctggaccttcggcgccggccccgccctgcagatccccttccccatgcagatggcctacaggttcaacggcatcggcgtgacccagaacgtgctgtacgagaaccagaagctgatcgccaaccagttcaacagcgccatcggcaagatccaggacagcctgagcagcacccccagcgccctgggcaagctgcaggacgtggtgaaccagaacgcccaggccctgaacaccctggtgaagcagctgagcagcaacttcggcgccatcagcagcgtgctgaacgacatcctgagcaggctggacccccccgaggccgaggtgcagatcgacaggctgatcaccggcaggctgcagagcctgcagacctacgtgacccagcagctgatcagggccgccgagatcagggccagcgccaacctggccgccaccaagatgagcgagtgcgtgctgggccagagcaagagggtggacttctgcggcaagggctaccacctgatgagcttcccccagagcgccccccacggcgtggtgttcctgcacgtgacctacgtgcccgcccaggagaagaacttcaccaccgcccccgccatctgccacgacggcaaggcccacttccccagggagggcgtgttcgtgagcaacggcacccactggttcgtgacccagaggaacttctacgagccccagatcatcaccaccgacaacaccttcgtgagcggcaactgcgacgtggtgatcggcatcgtgaacaacaccgtgtacgaccccctgcagcccgagctggacagcttcaaggaggagctggacaagtacttcaagaaccacaccagccccgacgtggacctgggcgacatcagcggcatcaacgccagcgtggtgaacatccagaaggagatcgacaggctgaacgaggtggccaagaacctgaacgagagcctgatcgacctgcaggagctgggcaagtacgagcagtacatcaagtggccctggtacatctggctgggcttcatcgccggcctgatcgccatcgtgatggtgaccatcatgctgtgctgcatgaccagctgctgcagctgcctgaagggctgctgcagctgcggcagctgctgcaagttcgacgaggacgacagcgagcccgtgctgaagggcgtgaagctgcactacaccggaagcggagccacgaacttctctctgttaaagcaagcaggagatgttgaagaaaaccccgggcctatgagcgacaacggcccccagaaccagaggaacgcccccaggatcaccttcggcggccccagcgacagcaccggcagcaaccagaacggcgagaggagcggcgccaggagcaagcagaggaggccccagggcctgcccaacaacaccgccagctggttcaccgccctgacccagcacggcaaggaggacctgaagttccccaggggccagggcgtgcccatcaacaccaacagcagccccgacgaccagatcggctactacaggagggccaccaggaggatcaggggcggcgacggcaagatgaaggacctgagccccaggtggtacttctactacctgggcaccggccccgaggccggcctgccctacggcgccaacaaggacggcatcatctgggtggccaccgagggcgccctgaacacccccaaggaccacatcggcaccaggaaccccgccaacaacgccgccatcgtgctgcagctgccccagggcaccaccctgcccaagggcttctacgccgagggcagcaggggcggcagccaggccagcagcaggagcagcagcaggagcaggaacagcagcaggaacagcacccccggcagcagcaggggcaccagccccgccaggatggccggcaacggcggcgacgccgccctggccctgctgctgctggacaggctgaaccagctggagagcaagatgagcggcaagggccagcagcagcagggccagaccgtgaccaagaagagcgccgccgaggccagcaagaagcccaggcagaagaggaccgccaccaaggcctacaacgtgacccaggccttcggcaggaggggccccgagcagacccagggcaacttcggcgaccaggagctgatcaggcagggcaccgactacaagcactggccccagatcgcccagttcgcccccagcgccagcgccttcttcggcatgagcaggatcggcatggaggtgacccccagcggcacctggctgacctacaccggcgccatcaagctggacgacaaggaccccaacttcaaggaccaggtgatcctgctgaacaagcacatcgacgcctacaagaccttcccccccaccgagcccaagaaggacaagaagaagaaggccgacgagacccaggccctgccccagaggcagaagaagcagcagaccgtgaccctgctgcccgccgccgacctggacgacttcagcaagcagctgcagcagagcatgagcagcgccgacagcacccaggcctgatga

SEQ ID NO: 340 - DNA, 3825 bp, synthetic construct
  source 1..3825: mol_type = other DNA; note = Synthesized Vaccine Candidate 55
atgttcgtgttcctggtgctgctgcccctggtgagcagccagtgcgtgaacctgaccaccaggacccagctgccccccgcctacaccaacagcttcaccaggggcgtgtactaccccgacaaggtgttcaggagcagcgtgctgcacagcacccaggacctgttcctgcccttcttcagcaacgtgacctggttccacgccatccacgtgagcggcaccaacggcaccaagaggttcgacaaccccgtgctgcccttcaacgacggcgtgtacttcgccagcaccgagaagagcaacatcatcaggggctggatcttcggcaccaccctggacagcaagacccagagcctgctgatcgtgaacaacgccaccaacgtggtgatcaaggtgtgcgagttccagttctgcaacgaccccttcctgggcgtgtactaccacaagaacaacaagagctggatggagagcgagttcagggtgtacagcagcgccaacaactgcaccttcgagtacgtgagccagcccttcctgatggacctggagggcaagcagggcaacttcaagaacctgagggagttcgtgttcaagaacatcgacggctacttcaagatctacagcaagcacacccccatcaacctggtgagggacctgccccagggcttcagcgccctggagcccctggtggacctgcccatcggcatcaacatcaccaggttccagaccctgctggccctgcacaggagctacctgacccccggcgacagcagcagcggctggaccgccggcgccgccgcctactacgtgggctacctgcagcccaggaccttcctgctgaagtacaacgagaacggcaccatcaccgacgccgtggactgcgccctggaccccctgagcgagaccaagtgcaccctgaagagcttcaccgtggagaagggcatctaccagaccagcaacttcagggtgcagcccaccgagagcatcgtgaggttccccaacatcaccaacctgtgccccttcggcgaggtgttcaacgccaccaggttcgccagcgtgtacgcctggaacaggaagaggatcagcaactgcgtggccgactacagcgtgctgtacaacagcgccagcttcagcaccttcaagtgctacggcgtgagccccaccaagctgaacgacctgtgcttcaccaacgtgtacgccgacagcttcgtgatcaggggcgacgaggtgaggcagatcgcccccggccagaccggcaagatcgccgactacaactacaagctgcccgacgacttcaccggctgcgtgatcgcctggaacagcaacaacctggacagcaaggtgggcggcaactacaactacctgtacaggctgttcaggaagagcaacctgaagcccttcgagagggacatcagcaccgagatctaccaggccggcagcaccccctgcaacggcgtggagggcttcaactgctacttccccctgcagagctacggcttccagcccaccaacggcgtgggctaccagccctacagggtggtggtgctgagcttcgagctgctgcacgcccccgccaccgtgtgcggccccaagaagagcaccaacctggtgaagaacaagtgcgtgaacttcaacttcaacggcctgaccggcaccggcgtgctgaccgagagcaacaagaagttcctgcccttccagcagttcggcagggacatcgccgacaccaccgacgccgtgagggacccccagaccctggagatcctggacatcaccccctgcagcttcggcggcgtgagcgtgatcacccccggcaccaacaccagcaaccaggtggccgtgctgtaccaggacgtgaactgcaccgaggtgcccgtggccatccacgccgaccagctgacccccacctggagggtgtacagcaccggcagcaacgtgttccagaccagggccggctgcctgatcggcgccgagcacgtgaacaacagctacgagtgcgacatccccatcggcgccggcatctgcgccagctaccagacccagaccaacagccccggcagcgccagcagcgtggccagccagagcatcatcgcctacaccatgagcctgggcgccgagaacagcgtggcctacagcaacaacagcatcgccatccccaccaacttcaccatcagcgtgaccaccgagatcctgcccgtgagcatgaccaagaccagcgtggactgcaccatgtacatctgcggcgacagcaccgagtgcagcaacctgctgctgcagtacggcagcttctgcacccagctgaacagggccctgaccggcatcgccgtggagcaggacaagaacacccaggaggtgttcgcccaggtgaagcagatctacaagaccccccccatcaaggacttcggcggcttcaacttcagccagatcctgcccgaccccagcaagcccagcaagaggagccccatcgaggacctgctgttcaacaaggtgaccctggccgacgccggcttcatcaagcagtacggcgactgcctgggcgacatcgccgccagggacctgatctgcgcccagaagttcaacggcctgaccgtgctgccccccctgctgaccgacgagatgatcgcccagtacaccagcgccctgctggccggcaccatcaccagcggctggaccttcggcgccggccccgccctgcagatccccttccccatgcagatggcctacaggttcaacggcatcggcgtgacccagaacgtgctgtacgagaaccagaagctgatcgccaaccagttcaacagcgccatcggcaagatccaggacagcctgagcagcacccccagcgccctgggcaagctgcaggacgtggtgaaccagaacgcccaggccctgaacaccctggtgaagcagctgagcagcaacttcggcgccatcagcagcgtgctgaacgacatcctgagcaggctggacccccccgaggccgaggtgcagatcgacaggctgatcaccggcaggctgcagagcctgcagacctacgtgacccagcagctgatcagggccgccgagatcagggccagcgccaacctggccgccaccaagatgagcgagtgcgtgctgggccagagcaagagggtggacttctgcggcaagggctaccacctgatgagcttcccccagagcgccccccacggcgtggtgttcctgcacgtgacctacgtgcccgcccaggagaagaacttcaccaccgcccccgccatctgccacgacggcaaggcccacttccccagggagggcgtgttcgtgagcaacggcacccactggttcgtgacccagaggaacttctacgagccccagatcatcaccaccgacaacaccttcgtgagcggcaactgcgacgtggtgatcggcatcgtgaacaacaccgtgtacgaccccctgcagcccgagctggacagcttcaaggaggagctggacaagtacttcaagaaccacaccagccccgacgtggacctgggcgacatcagcggcatcaacgccagcgtggtgaacatccagaaggagatcgacaggctgaacgaggtggccaagaacctgaacgagagcctgatcgacctgcaggagctgggcaagtacgagcagtacatcaagtggccctggtacatctggctgggcttcatcgccggcctgatcgccatcgtgatggtgaccatcatgctgtgctgcatgaccagctgctgcagctgcctgaagggctgctgcagctgcggcagctgctgcaagttcgacgaggacgacagcgagcccgtgctgaagggcgtgaagctgcactacacctgatga

SEQ ID NO: 341 - DNA, 7575 bp, synthetic construct
  source 1..7575: mol_type = other DNA; note = Synthesized Vaccine Candidate 56
atgttcgtgttcctggtgctgctgcccctggtgagcagccagtgcgtgaacctgaccaccaggacccagctgccccccgcctacaccaacagcttcaccaggggcgtgtactaccccgacaaggtgttcaggagcagcgtgctgcacagcacccaggacctgttcctgcccttcttcagcaacgtgacctggttccacgccatccacgtgagcggcaccaacggcaccaagaggttcgacaaccccgtgctgcccttcaacgacggcgtgtacttcgccagcaccgagaagagcaacatcatcaggggctggatcttcggcaccaccctggacagcaagacccagagcctgctgatcgtgaacaacgccaccaacgtggtgatcaaggtgtgcgagttccagttctgcaacgaccccttcctgggcgtgtactaccacaagaacaacaagagctggatggagagcgagttcagggtgtacagcagcgccaacaactgcaccttcgagtacgtgagccagcccttcctgatggacctggagggcaagcagggcaacttcaagaacctgagggagttcgtgttcaagaacatcgacggctacttcaagatctacagcaagcacacccccatcaacctggtgagggacctgccccagggcttcagcgccctggagcccctggtggacctgcccatcggcatcaacatcaccaggttccagaccctgctggccctgcacaggagctacctgacccccggcgacagcagcagcggctggaccgccggcgccgccgcctactacgtgggctacctgcagcccaggaccttcctgctgaagtacaacgagaacggcaccatcaccgacgccgtggactgcgccctggaccccctgagcgagaccaagtgcaccctgaagagcttcaccgtggagaagggcatctaccagaccagcaacttcagggtgcagcccaccgagagcatcgtgaggttccccaacatcaccaacctgtgccccttcggcgaggtgttcaacgccaccaggttcgccagcgtgtacgcctggaacaggaagaggatcagcaactgcgtggccgactacagcgtgctgtacaacagcgccagcttcagcaccttcaagtgctacggcgtgagccccaccaagctgaacgacctgtgcttcaccaacgtgtacgccgacagcttcgtgatcaggggcgacgaggtgaggcagatcgcccccggccagaccggcaagatcgccgactacaactacaagctgcccgacgacttcaccggctgcgtgatcgcctggaacagcaacaacctggacagcaaggtgggcggcaactacaactacctgtacaggctgttcaggaagagcaacctgaagcccttcgagagggacatcagcaccgagatctaccaggccggcagcaccccctgcaacggcgtggagggcttcaactgctacttccccctgcagagctacggcttccagcccaccaacggcgtgggctaccagccctacagggtggtggtgctgagcttcgagctgctgcacgcccccgccaccgtgtgcggccccaagaagagcaccaacctggtgaagaacaagtgcgtgaacttcaacttcaacggcctgaccggcaccggcgtgctgaccgagagcaacaagaagttcctgcccttccagcagttcggcagggacatcgccgacaccaccgacgccgtgagggacccccagaccctggagatcctggacatcaccccctgcagcttcggcggcgtgagcgtgatcacccccggcaccaacaccagcaaccaggtggccgtgctgtaccaggacgtgaactgcaccgaggtgcccgtggccatccacgccgaccagctgacccccacctggagggtgtacagcaccggcagcaacgtgttccagaccagggccggctgcctgatcggcgccgagcacgtgaacaacagctacgagtgcgacatccccatcggcgccggcatctgcgccagctaccagacccagaccaacagccccggcagcgccagcagcgtggccagccagagcatcatcgcctacaccatgagcctgggcgccgagaacagcgtggcctacagcaacaacagcatcgccatccccaccaacttcaccatcagcgtgaccaccgagatcctgcccgtgagcatgaccaagaccagcgtggactgcaccatgtacatctgcggcgacagcaccgagtgcagcaacctgctgctgcagtacggcagcttctgcacccagctgaacagggccctgaccggcatcgccgtggagcaggacaagaacacccaggaggtgttcgcccaggtgaagcagatctacaagaccccccccatcaaggacttcggcggcttcaacttcagccagatcctgcccgaccccagcaagcccagcaagaggagccccatcgaggacctgctgttcaacaaggtgaccctggccgacgccggcttcatcaagcagtacggcgactgcctgggcgacatcgccgccagggacctgatctgcgcccagaagttcaacggcctgaccgtgctgccccccctgctgaccgacgagatgatcgcccagtacaccagcgccctgctggccggcaccatcaccagcggctggaccttcggcgccggccccgccctgcagatccccttccccatgcagatggcctacaggttcaacggcatcggcgtgacccagaacgtgctgtacgagaaccagaagctgatcgccaaccagttcaacagcgccatcggcaagatccaggacagcctgagcagcacccccagcgccctgggcaagctgcaggacgtggtgaaccagaacgcccaggccctgaacaccctggtgaagcagctgagcagcaacttcggcgccatcagcagcgtgctgaacgacatcctgagcaggctggacccccccgaggccgaggtgcagatcgacaggctgatcaccggcaggctgcagagcctgcagacctacgtgacccagcagctgatcagggccgccgagatcagggccagcgccaacctggccgccaccaagatgagcgagtgcgtgctgggccagagcaagagggtggacttctgcggcaagggctaccacctgatgagcttcccccagagcgccccccacggcgtggtgttcctgcacgtgacctacgtgcccgcccaggagaagaacttcaccaccgcccccgccatctgccacgacggcaaggcccacttccccagggagggcgtgttcgtgagcaacggcacccactggttcgtgacccagaggaacttctacgagccccagatcatcaccaccgacaacaccttcgtgagcggcaactgcgacgtggtgatcggcatcgtgaacaacaccgtgtacgaccccctgcagcccgagctggacagcttcaaggaggagctggacaagtacttcaagaaccacaccagccccgacgtggacctgggcgacatcagcggcatcaacgccagcgtggtgaacatccagaaggagatcgacaggctgaacgaggtggccaagaacctgaacgagagcctgatcgacctgcaggagctgggcaagtacgagcagtacatcaagtggccctggtacatctggctgggcttcatcgccggcctgatcgccatcgtgatggtgaccatcatgctgtgctgcatgaccagctgctgcagctgcctgaagggctgctgcagctgcggcagctgctgcaagttcgacgaggacgacagcgagcccgtgctgaagggcgtgaagctgcactacaccggaagcggagccacgaacttctctctgttaaagcaagcaggagatgttgaagaaaaccccgggcctgaccaggaaccccgcctggaggaaggccgtgttcatcagcccctacaacagccagaacgccgtggccagcaagatcctgggcctgcccacccagaccgtggacagcagccagggcagcgagtacgactacgtgatcttcacccagaccaccgagaccgcccacagctgcaacgtgaacaggttcaacgtggccatcaccagggccaaggtgggcatcctgtgcatcatgagcgacagggacctgtacgacaagctgcagttcaccagcctggagatccccaggaggaacgtggccaccctgcaggccgagaacgtgaccggcctgttcaaggactgcagcaaggtgatcaccggcctgcaccccacccaggcccccacccacctgagcgtggacaccaagttcaagaccgagggcctgtgcgtggacatccccggcatccccaaggacatgacctacaggaggctgatcagcatgatgggcttcaagatgaactaccaggtgaacggctaccccaacatgttcatcaccagggaggaggccatcaggcacgtgagggcctggatcggcttcgacgtggagggctgccacgccaccagggaggccgtgggcaccaacctgcccctgcagctgggcttcagcaccggcgtgaacctggtggccgtgcccaccggctacgtggacacccccaacaacaccgacttcagcagggtgagcgccaagcccccccccggcgaccagttcaagcacctgatccccctgatgtacaagggcctgccctggaacgtggtgaggatcaagatcgtgcagatgctgagcgacaccctgaagaacctgagcgacagggtggtgttcgtgctgtgggcccacggcttcgagctgaccagcatgaagtacttcgtgaagatcggccccgagaggacctgctgcctgtgcgacaggagggccacctgcttcagcaccgccagcgacacctacgcctgctggcaccacagcatcggcttcgactacgtgtacaaccccttcatgatcgacgtgcagcagtggggcttcaccggcaacctgcagagcaaccacgacctgtactgccaggtgcacggcaacgcccacgtggccagctgcgacgccatcatgaccaggtgcctggccgtgcacgagtgcttcgtgaagagggtggactggaccatcgagtaccccatcatcggcgacgagctgaagatcaacgccgcctgcaggaaggtgcagcacatggtggtgaaggccgccctgctggccgacaagttccccgtgctgcacgacatcggcaaccccaaggccatcaagtgcgtgccccaggccgacgtggagtggaagttctacgacgcccagccctgcagcgacaaggcctacaagatcgaggagctgttctacagctacgccacccacagcgacaagttcaccgacggcgtgtgcctgttctggaactgcaacgtggacaggtaccccgccaacagcatcgtgtgcaggttcgacaccagggtgctgagcaacctgaacctgcccggctgcgacggcggcagcctgtacgtgaacaagcacgccttccacacccccgccttcgacaagagcgccttcgtgaacctgaagcagctgcccttcttctactacagcgacagcccctgcgagagccacggcaagcaggtggtgagcgacatcgactacgtgcccctgaagagcgccacctgcatcaccaggtgcaacctgggcggcgccgtgtgcaggcaccacgccaacgagtacaggctgtacctggacgcctacaacatgatgatcagcgccggcttcagcctgtgggtgtacaagcagttcgacacctacaacctgtggaacaccttcaccaggctgcagagcctggagaacgtggccttcaacgtggtgaacaagggccacttcgacggccagcagggcgaggtgcccgtgagcatcatcaacaacaccgtgtacaccaaggtggacggcgtggacgtggagctgttcgagaacaagaccaccctgcccgtgaacgtggccttcgagctgtgggccaagaggaacatcaagcccgtgcccgaggtgaagatcctgaacaacctgggcgtggacatcgccgccaacaccgtgatctgggactacaagagggacgcccccgcccacatcagcaccatcggcgtgtgcagcatgaccgacatcgccaagaagcccaccgagaccatctgcgcccccctgaccgtgttcttcgacggcagggtggacggccaggtggacctgttcaggaacgccaggaacggcgtgctgatcaccgagggcagcgtgaagggcctgcagcccagcgtgggccccaagcaggccagcctgaacggcgtgaccctgatcggcgaggccgtgaagacccagttcaactactacaagaaggtggacggcgtggtgcagcagctgcccgagacctacttcacccagagcaggaacctgcaggagttcaagcccaggagccagatggagatcgacttcctggagctggccatggacgagttcatcgagaggtacaagctggagggctacgccttcgagcacatcgtgtacggcgacttcagccacagccagctgggcggcctgcacctgctgatcggcctggccaagaggttcaaggagagccccttcgagctggaggacttcatccccatggacagcaccgtgaagaactacttcatcaccgacgcccagaccggcagcagcaagtgcgtgtgcagcgtgatcgacctgctgctggacgacttcgtggagatcatcaagagccaggacctgagcgtggtgagcaaggtggtgaaggtgaccatcgactacaccgagatcagcttcatgctgtggtgcaaggacggccacgtggagaccttctaccccaagctgcagagcagccaggcctggcagcccggcgtggccatgcccaacctgtacaagatgcagaggatgctgctggagaagtgcgacctgcagaactacggcgacagcgccaccctgcccaagggcatcatgatgaacgtggccaagtacacccagctgtgccagtacctgaacaccctgaccctggccgtgccctacaacatgagggtgatccacttcggcgccggcagcgacaagggcgtggcccccggcaccgccgtgctgaggcagtggctgcccaccggcaccctgctggtggacagcgacctgaacgacttcgtgagcgacgccgacagcaccctgatcggcgactgcgccaccgtgcacaccgccaacaagtgggacctgatcatcagcgacatgtacgaccccaagaccaagaacgtgaccaaggagaacgacagcaaggagggcttcttcacctacatctgcggcttcatccagcagaagctggccctgggcggcagcgtggccatcaagatcaccgagcacagctggaacgccgacctgtacaagctgatgggccacttcgcctggtggaccgccttcgtgaccaacgtgaacgccagcagcagcgaggccttcctgatcggctgcaactacctgggcaagcccagggagcagatcgacggctacgtgatgcacgccaactacatcttctggaggaacaccaaccccatccagctgagcagctacagcctgttcgacatgagcaagttccccctgaagcttgatga

SEQ ID NO: 342 - DNA, 5001 bp, synthetic construct
  source 1..5001: mol_type = other DNA; note = Synthesized Vaccine Candidate 57
atgttcgtgttcctggtgctgctgcccctggtgagcagccagtgcgtgaacctgaccaccaggacccagctgccccccgcctacaccaacagcttcaccaggggcgtgtactaccccgacaaggtgttcaggagcagcgtgctgcacagcacccaggacctgttcctgcccttcttcagcaacgtgacctggttccacgccatccacgtgagcggcaccaacggcaccaagaggttcgacaaccccgtgctgcccttcaacgacggcgtgtacttcgccagcaccgagaagagcaacatcatcaggggctggatcttcggcaccaccctggacagcaagacccagagcctgctgatcgtgaacaacgccaccaacgtggtgatcaaggtgtgcgagttccagttctgcaacgaccccttcctgggcgtgtactaccacaagaacaacaagagctggatggagagcgagttcagggtgtacagcagcgccaacaactgcaccttcgagtacgtgagccagcccttcctgatggacctggagggcaagcagggcaacttcaagaacctgagggagttcgtgttcaagaacatcgacggctacttcaagatctacagcaagcacacccccatcaacctggtgagggacctgccccagggcttcagcgccctggagcccctggtggacctgcccatcggcatcaacatcaccaggttccagaccctgctggccctgcacaggagctacctgacccccggcgacagcagcagcggctggaccgccggcgccgccgcctactacgtgggctacctgcagcccaggaccttcctgctgaagtacaacgagaacggcaccatcaccgacgccgtggactgcgccctggaccccctgagcgagaccaagtgcaccctgaagagcttcaccgtggagaagggcatctaccagaccagcaacttcagggtgcagcccaccgagagcatcgtgaggttccccaacatcaccaacctgtgccccttcggcgaggtgttcaacgccaccaggttcgccagcgtgtacgcctggaacaggaagaggatcagcaactgcgtggccgactacagcgtgctgtacaacagcgccagcttcagcaccttcaagtgctacggcgtgagccccaccaagctgaacgacctgtgcttcaccaacgtgtacgccgacagcttcgtgatcaggggcgacgaggtgaggcagatcgcccccggccagaccggcaagatcgccgactacaactacaagctgcccgacgacttcaccggctgcgtgatcgcctggaacagcaacaacctggacagcaaggtgggcggcaactacaactacctgtacaggctgttcaggaagagcaacctgaagcccttcgagagggacatcagcaccgagatctaccaggccggcagcaccccctgcaacggcgtggagggcttcaactgctacttccccctgcagagctacggcttccagcccaccaacggcgtgggctaccagccctacagggtggtggtgctgagcttcgagctgctgcacgcccccgccaccgtgtgcggccccaagaagagcaccaacctggtgaagaacaagtgcgtgaacttcaacttcaacggcctgaccggcaccggcgtgctgaccgagagcaacaagaagttcctgcccttccagcagttcggcagggacatcgccgacaccaccgacgccgtgagggacccccagaccctggagatcctggacatcaccccctgcagcttcggcggcgtgagcgtgatcacccccggcaccaacaccagcaaccaggtggccgtgctgtaccaggacgtgaactgcaccgaggtgcccgtggccatccacgccgaccagctgacccccacctggagggtgtacagcaccggcagcaacgtgttccagaccagggccggctgcctgatcggcgccgagcacgtgaacaacagctacgagtgcgacatccccatcggcgccggcatctgcgccagctaccagacccagaccaacagccccggcagcgccagcagcgtggccagccagagcatcatcgcctacaccatgagcctgggcgccgagaacagcgtggcctacagcaacaacagcatcgccatccccaccaacttcaccatcagcgtgaccaccgagatcctgcccgtgagcatgaccaagaccagcgtggactgcaccatgtacatctgcggcgacagcaccgagtgcagcaacctgctgctgcagtacggcagcttctgcacccagctgaacagggccctgaccggcatcgccgtggagcaggacaagaacacccaggaggtgttcgcccaggtgaagcagatctacaagaccccccccatcaaggacttcggcggcttcaacttcagccagatcctgcccgaccccagcaagcccagcaagaggagccccatcgaggacctgctgttcaacaaggtgaccctggccgacgccggcttcatcaagcagtacggcgactgcctgggcgacatcgccgccagggacctgatctgcgcccagaagttcaacggcctgaccgtgctgccccccctgctgaccgacgagatgatcgcccagtacaccagcgccctgctggccggcaccatcaccagcggctggaccttcggcgccggccccgccctgcagatccccttccccatgcagatggcctacaggttcaacggcatcggcgtgacccagaacgtgctgtacgagaaccagaagctgatcgccaaccagttcaacagcgccatcggcaagatccaggacagcctgagcagcacccccagcgccctgggcaagctgcaggacgtggtgaaccagaacgcccaggccctgaacaccctggtgaagcagctgagcagcaacttcggcgccatcagcagcgtgctgaacgacatcctgagcaggctggacccccccgaggccgaggtgcagatcgacaggctgatcaccggcaggctgcagagcctgcagacctacgtgacccagcagctgatcagggccgccgagatcagggccagcgccaacctggccgccaccaagatgagcgagtgcgtgctgggccagagcaagagggtggacttctgcggcaagggctaccacctgatgagcttcccccagagcgccccccacggcgtggtgttcctgcacgtgacctacgtgcccgcccaggagaagaacttcaccaccgcccccgccatctgccacgacggcaaggcccacttccccagggagggcgtgttcgtgagcaacggcacccactggttcgtgacccagaggaacttctacgagccccagatcatcaccaccgacaacaccttcgtgagcggcaactgcgacgtggtgatcggcatcgtgaacaacaccgtgtacgaccccctgcagcccgagctggacagcttcaaggaggagctggacaagtacttcaagaaccacaccagccccgacgtggacctgggcgacatcagcggcatcaacgccagcgtggtgaacatccagaaggagatcgacaggctgaacgaggtggccaagaacctgaacgagagcctgatcgacctgcaggagctgggcaagtacgagcagtacatcaagtggccctggtacatctggctgggcttcatcgccggcctgatcgccatcgtgatggtgaccatcatgctgtgctgcatgaccagctgctgcagctgcctgaagggctgctgcagctgcggcagctgctgcaagttcgacgaggacgacagcgagcccgtgctgaagggcgtgaagctgcactacaccggaagcggagccacgaacttctctctgttaaagcaagcaggagatgttgaagaaaaccccgggcctatgtacagcttcgtgagcgaggagaccggcaccctgatcgtgaacagcgtgctgctgttcctggccttcgtggtgttcctgctggtgaccctggccatcctgaccgccctgaggctgtgcgcctactgctgcaacatcgtgaacgtgagcctggtgaagcccagcttctacgtgtacagcagggtgaagaacctgaacagcagcagggtgcccgacctgctggtgggaagcggagccacgaacttctctctgttaaagcaagcaggagatgttgaagaaaaccccgggcctatggccgacagcaacggcaccatcaccgtggaggagctgaagaagctgctggagcagtggaacctggtgatcggcttcctgttcctgacctggatctgcctgctgcagttcgcctacgccaacaggaacaggttcctgtacatcatcaagctgatcttcctgtggctgctgtggcccgtgaccctggcctgcttcgtgctggccgccgtgtacaggatcaactggatcaccggcggcatcgccatcgccatggcctgcctggtgggcctgatgtggctgagctacttcatcgccagcttcaggctgttcgccaggaccaggagcatgtggagcttcaaccccgagaccaacatcctgctgaacgtgcccctgcacggcaccatcctgaccaggcccctgctggagagcgagctggtgatcggcgccgtgatcctgaggggccacctgaggatcgccggccaccacctgggcaggtgcgacatcaaggacctgcccaaggagatcaccgtggccaccagcaggaccctgagctactacaagctgggcgccagccagagggtggccggcgacagcggcttcgccgcctacagcaggtacaggatcggcaactacaagctgaacaccgaccacagcagcagcagcgacaacatcgccctgctggtgcagggaagcggagccacgaacttctctctgttaaagcaagcaggagatgttgaagaaaaccccgggcctatgaagatcatcctgttcctggccctgatcaccctggccacctgcgagctgtaccactaccaggagtgcgtgaggggcaccaccgtgtgatga

SEQ ID NO: 343 - DNA, 10023 bp, synthetic construct
  source 1..10023: mol_type = other DNA; note = Synthesized Vaccine Candidate 58
atgttcgtgttcctggtgctgctgcccctggtgagcagccagtgcgtgaacctgaccaccaggacccagctgccccccgcctacaccaacagcttcaccaggggcgtgtactaccccgacaaggtgttcaggagcagcgtgctgcacagcacccaggacctgttcctgcccttcttcagcaacgtgacctggttccacgccatccacgtgagcggcaccaacggcaccaagaggttcgacaaccccgtgctgcccttcaacgacggcgtgtacttcgccagcaccgagaagagcaacatcatcaggggctggatcttcggcaccaccctggacagcaagacccagagcctgctgatcgtgaacaacgccaccaacgtggtgatcaaggtgtgcgagttccagttctgcaacgaccccttcctgggcgtgtactaccacaagaacaacaagagctggatggagagcgagttcagggtgtacagcagcgccaacaactgcaccttcgagtacgtgagccagcccttcctgatggacctggagggcaagcagggcaacttcaagaacctgagggagttcgtgttcaagaacatcgacggctacttcaagatctacagcaagcacacccccatcaacctggtgagggacctgccccagggcttcagcgccctggagcccctggtggacctgcccatcggcatcaacatcaccaggttccagaccctgctggccctgcacaggagctacctgacccccggcgacagcagcagcggctggaccgccggcgccgccgcctactacgtgggctacctgcagcccaggaccttcctgctgaagtacaacgagaacggcaccatcaccgacgccgtggactgcgccctggaccccctgagcgagaccaagtgcaccctgaagagcttcaccgtggagaagggcatctaccagaccagcaacttcagggtgcagcccaccgagagcatcgtgaggttccccaacatcaccaacctgtgccccttcggcgaggtgttcaacgccaccaggttcgccagcgtgtacgcctggaacaggaagaggatcagcaactgcgtggccgactacagcgtgctgtacaacagcgccagcttcagcaccttcaagtgctacggcgtgagccccaccaagctgaacgacctgtgcttcaccaacgtgtacgccgacagcttcgtgatcaggggcgacgaggtgaggcagatcgcccccggccagaccggcaagatcgccgactacaactacaagctgcccgacgacttcaccggctgcgtgatcgcctggaacagcaacaacctggacagcaaggtgggcggcaactacaactacctgtacaggctgttcaggaagagcaacctgaagcccttcgagagggacatcagcaccgagatctaccaggccggcagcaccccctgcaacggcgtggagggcttcaactgctacttccccctgcagagctacggcttccagcccaccaacggcgtgggctaccagccctacagggtggtggtgctgagcttcgagctgctgcacgcccccgccaccgtgtgcggccccaagaagagcaccaacctggtgaagaacaagtgcgtgaacttcaacttcaacggcctgaccggcaccggcgtgctgaccgagagcaacaagaagttcctgcccttccagcagttcggcagggacatcgccgacaccaccgacgccgtgagggacccccagaccctggagatcctggacatcaccccctgcagcttcggcggcgtgagcgtgatcacccccggcaccaacaccagcaaccaggtggccgtgctgtaccaggacgtgaactgcaccgaggtgcccgtggccatccacgccgaccagctgacccccacctggagggtgtacagcaccggcagcaacgtgttccagaccagggccggctgcctgatcggcgccgagcacgtgaacaacagctacgagtgcgacatccccatcggcgccggcatctgcgccagctaccagacccagaccaacagccccggcagcgccagcagcgtggccagccagagcatcatcgcctacaccatgagcctgggcgccgagaacagcgtggcctacagcaacaacagcatcgccatccccaccaacttcaccatcagcgtgaccaccgagatcctgcccgtgagcatgaccaagaccagcgtggactgcaccatgtacatctgcggcgacagcaccgagtgcagcaacctgctgctgcagtacggcagcttctgcacccagctgaacagggccctgaccggcatcgccgtggagcaggacaagaacacccaggaggtgttcgcccaggtgaagcagatctacaagaccccccccatcaaggacttcggcggcttcaacttcagccagatcctgcccgaccccagcaagcccagcaagaggagccccatcgaggacctgctgttcaacaaggtgaccctggccgacgccggcttcatcaagcagtacggcgactgcctgggcgacatcgccgccagggacctgatctgcgcccagaagttcaacggcctgaccgtgctgccccccctgctgaccgacgagatgatcgcccagtacaccagcgccctgctggccggcaccatcaccagcggctggaccttcggcgccggccccgccctgcagatccccttccccatgcagatggcctacaggttcaacggcatcggcgtgacccagaacgtgctgtacgagaaccagaagctgatcgccaaccagttcaacagcgccatcggcaagatccaggacagcctgagcagcacccccagcgccctgggcaagctgcaggacgtggtgaaccagaacgcccaggccctgaacaccctggtgaagcagctgagcagcaacttcggcgccatcagcagcgtgctgaacgacatcctgagcaggctggacccccccgaggccgaggtgcagatcgacaggctgatcaccggcaggctgcagagcctgcagacctacgtgacccagcagctgatcagggccgccgagatcagggccagcgccaacctggccgccaccaagatgagcgagtgcgtgctgggccagagcaagagggtggacttctgcggcaagggctaccacctgatgagcttcccccagagcgccccccacggcgtggtgttcctgcacgtgacctacgtgcccgcccaggagaagaacttcaccaccgcccccgccatctgccacgacggcaaggcccacttccccagggagggcgtgttcgtgagcaacggcacccactggttcgtgacccagaggaacttctacgagccccagatcatcaccaccgacaacaccttcgtgagcggcaactgcgacgtggtgatcggcatcgtgaacaacaccgtgtacgaccccctgcagcccgagctggacagcttcaaggaggagctggacaagtacttcaagaaccacaccagccccgacgtggacctgggcgacatcagcggcatcaacgccagcgtggtgaacatccagaaggagatcgacaggctgaacgaggtggccaagaacctgaacgagagcctgatcgacctgcaggagctgggcaagtacgagcagtacatcaagtggccctggtacatctggctgggcttcatcgccggcctgatcgccatcgtgatggtgaccatcatgctgtgctgcatgaccagctgctgcagctgcctgaagggctgctgcagctgcggcagctgctgcaagttcgacgaggacgacagcgagcccgtgctgaagggcgtgaagctgcactacaccggaagcggagccacgaacttctctctgttaaagcaagcaggagatgttgaagaaaaccccgggcctgcccccaccaaggtgaccttcggcgacgacaccgtgatcgaggtgcagggctacaagagcgtgaacatcaccttcgagctggacgagaggatcgacaaggtgctgaacgagaagtgcagcgcctacaccgtggagctgggcaccgaggtgaacgagttcgcctgcgtggtggccgacgccgtgatcaagaccctgcagcccgtgagcgagctgctgacccccctgggcatcgacctggacgagtggagcatggccacctactacctgttcgacgagagcggcgagttcaagctggccagccacatgtactgcagcttctacccccccgacgaggacgaggaggagggcgactgcgaggaggaggagttcgagcccagcacccagtacgagtacggcaccgaggacgactaccagggcaagcccctggagttcggcgccaccagcgccgccctgcagcccgaggaggagcaggaggaggactggctggacgacgacagccagcagaccgtgggccagcaggacggcagcgaggacaaccagaccaccaccatccagaccatcgtggaggtgcagccccagctggagatggagctgacccccgtggtgcagaccatcgaggtgaacagcttcagcggctacctgaagctgaccgacaacgtgtacatcaagaacgccgacatcgtggaggaggccaagaaggtgaagcccaccgtggtggtgaacgccgccaacgtgtacctgaagcacggcggcggcgtggccggcgccctgaacaaggccaccaacaacgccatgcaggtggagagcgacgactacatcgccaccaacggccccctgaaggtgggcggcagctgcgtgctgagcggccacaacctggccaagcactgcctgcacgtggtgggccccaacgtgaacaagggcgaggacatccagctgctgaagagcgcctacgagaacttcaaccagcacgaggtgctgctggcccccctgctgagcgccggcatcttcggcgccgaccccatccacagcctgagggtgtgcgtggacaccgtgaggaccaacgtgtacctggccgtgttcgacaagaacctgtacgacaagctggtgagcagcttcctggagatgaagagcgagaagcaggtggagcagaagatcgccgagatccccaaggaggaggtgaagcccttcatcaccgagagcaagcccagcgtggagcagaggaagcaggacgacaagaagatcaaggcctgcgtggaggaggtgaccaccaccctggaggagaccaagttcctgaccgagaacctgctgctgtacatcgacatcaacggcaacctgcaccccgacagcgccaccctggtgagcgacatcgacatcaccttcctgaagaaggacgccccctacatcgtgggcgacgtggtgcaggagggcgtgctgaccgccgtggtgatccccaccaagaaggccggcggcaccaccgagatgctggccaaggccctgaggaaggtgcccaccgacaactacatcaccacctaccccggccagggcctgaacggctacaccgtggaggaggccaagaccgtgctgaagaagtgcaagagcgccttctacatcctgcccagcatcatcagcaacgagaagcaggagatcctgggcaccgtgagctggaacctgagggagatgctggcccacgccgaggagaccaggaagctgatgcccgtgtgcgtggagaccaaggccatcgtgagcaccatccagaggaagtacaagggcatcaagatccaggagggcgtggtggactacggcgccaggttctacttctacaccagcaagaccaccgtggccagcctgatcaacaccctgaacgacctgaacgagaccctggtgaccatgcccctgggctacgtgacccacggcctgaacctggaggaggccgccaggtacatgaggagcctgaaggtgcccgccaccgtgagcgtgagcagccccgacgccgtgaccgcctacaacggctacctgaccagcagcagcaagacccccgaggagcacttcatcgagaccatcagcctggccggcagctacaaggactggagctacagcggccagagcacccagctgggcatcgagttcctgaagaggggcgacaagagcgtgtactacaccagcaaccccaccaccttccacctggacggcgaggtgatcaccttcgacaacctgaagaccctgctgagcctgagggaggtgaggaccatcaaggtgttcaccaccgtggacaacatcaacctgcacggaagcggagccacgaacttctctctgttaaagcaagcaggagatgttgaagaaaaccccgggcctagcggcttcaggaagatggccttccccagcggcaaggtggagggctgcatggtgcaggtgacctgcggcaccaccaccctgaacggcctgtggctggacgacgtggtgtactgccccaggcacgtgatctgcaccagcgaggacatgctgaaccccaactacgaggacctgctgatcaggaagagcaaccacaacttcctggtgcaggccggcaacgtgcagctgagggtgatcggccacagcatgcagaactgcgtgctgaagctgaaggtggacaccgccaaccccaagacccccaagtacaagttcgtgaggatccagcccggccagaccttcagcgtgctggcctgctacaacggcagccccagcggcgtgtaccagtgcgccatgaggcccaacttcaccatcaagggcagcttcctgaacggcagctgcggcagcgtgggcttcaacatcgactacgactgcgtgagcttctgctacatgcaccacatggagctgcccaccggcgtgcacgccggcaccgacctggagggcaacttctacggccccttcgtggacaggcagaccgcccaggccgccggcaccgacaccaccatcaccgtgaacgtgctggcctggctgtacgccgccgtgatcaacggcgacaggtggttcctgaacaggttcaccaccaccctgaacgacttcaacctggtggccatgaagtacaactacgagcccctgacccaggaccacgtggacatcctgggccccctgagcgcccagaccggcatcgccgtgctggacatgtgcgccagcctgaaggagctgctgcagaacggcatgaacggcaggaccatcctgggcagcgccctgctggaggacgagttcacccccttcgacgtggtgaggcagtgcagcggcgtgaccttccagggaagcggagccacgaacttctctctgttaaagcaagcaggagatgttgaagaaaaccccgggcctagcgccgacgcccagagcttcctgaacagggtgtgcggcgtgagcgccgccaggctgaccccctgcggcaccggcaccagcaccgacgtggtgtacagggccttcgacatctacaacgacaaggtggccggcttcgccaagttcctgaagaccaactgctgcaggttccaggagaaggacgaggacgacaacctgatcgacagctacttcgtggtgaagaggcacaccttcagcaactaccagcacgaggagaccatctacaacctgctgaaggactgccccgccgtggccaagcacgacttcttcaagttcaggatcgacggcgacatggtgccccacatcagcaggcagaggctgaccaagtacaccatggccgacctggtgtacgccctgaggcacttcgacgagggcaactgcgacaccctgaaggagatcctggtgacctacaactgctgcgacgacgactacttcaacaagaaggactggtacgacttcgtggagaaccccgacatcctgagggtgtacgccaacctgggcgagagggtgaggcaggccctgctgaagaccgtgcagttctgcgacgccatgaggaacgccggcatcgtgggcgtgctgaccctggacaaccaggacctgaacggcaactggtacgacttcggcgacttcatccagaccacccccggcagcggcgtgcccgtggtggacagctactacagcctgctgatgcccatcctgaccctgaccagggccctgaccgccgagagccacgtggacaccgacctgaccaagccctacatcaagtgggacctgctgaagtacgacttcaccgaggagaggctgaagctgttcgacaggtacttcaagtactgggaccagacctaccaccccaactgcgtgaactgcctggacgacaggtgcatcctgcactgcgccaacttcaacgtgctgttcagcaccgtgttcccccccaccagcttcggccccctggtgaggaagatcttcgtggacggcgtgcccttcgtggtgagcaccggctaccacttcagggagctgggcgtggtgcacaaccaggacgtgaacctgcacagcagcaggctgagcttcaaggagctgctggtgtacgccgccgaccccgccatgcacgccgccagcggcaacctgctgctggacaagaggaccacctgcttcagcgtggccgccctgaccaacaacgtggccttccagaccgtgaagcccggcaacttcaacaaggacttctacgacttcgccgtgagcaagggcttcttcaaggagggcagcagcgtggagctgaagcacttcttcttcgcccaggacggcaacgccgccatcagcgactacgactactacaggtacaacctgcccaccatgtgcgacatcaggcagctgctgttcgtggtggaggtggtggacaagtacttcgactgctacgacggcggctgcatcaacgccaaccaggtgatcgtgaacaacctggacaagagcgccggcttccccttcaacaagtggggcaaggccaggctgtactacgacagcatgagctacgaggaccaggacgccctgttcgcctacaccaagaggaacgtgatccccaccatcacccagatgaacctgaagtacgccatcagcgccaagaacagggccaggaccgtggccggcgtgagcatctgcagcaccatgaccaacaggcagttccaccagaagctgctgaagagcatcgccgccaccaggggcgccaccgtggtgatcggcaccagcaagttctacggcggctggcacaacatgctgaagaccgtgtacagcgacgtggagaacccccacctgatgggctgggactaccccaagtgcgacagggccatgcccaacatgctgaggatcatggccagcctggtgctggccaggaagcacaccacctgctgcagcctgagccacaggttctacaggctggccaacgagtgcgcccaggtgctgagcgagatggtgatgtgcggcggcagcctgtacgtgaagcccggcggcaccagcagcggcgacgccaccaccgcctacgccaacagcgtgttcaacatctgccaggccgtgaccgccaacgtgaacgccctgctgagcaccgacggcaacaagatcgccgacaagtacgtgaggaacctgcagcacaggctgtacgagtgcctgtacaggaacagggacgtggacaccgacttcgtgaacgagttctacgcctacctgaggaagcacttcagcatgatgatcctgagcgacgacgccgtggtgtgcttcaacagcacctacgccagccagggcctggtggccagcatcaagaacttcaagagcgtgctgtactaccagaacaacgtgttcatgagcgaggccaagtgctggaccgagaccgacctgaccaagggcccccacgagttctgcagccagcacaccatgctggtgaagcagggcgacgactacgtgtacctgccctaccccgaccccagcaggatcctgggcgccggctgcttcgtggacgacatcgtgaagaccgacggcaccctgatgatcgagaggttcgtgagcctggccatcgacgcctaccccctgaccaagcaccccaaccaggagtacgccgacgtgttccacctgtacctgcagtacatcaggaagctgcacgacgagctgaccggccacatgctggacatgtacagcgtgatgctgaccaacgacaacaccagcaggtactgggagcccgagttctacgaggccatgtacaccccccacaccgtgctgcagtgatga

SEQ ID NO: 344 - DNA, 6177 bp, synthetic construct
  source 1..6177: mol_type = other DNA; note = Synthesized Vaccine Candidate 59
atgttcgtgttcctggtgctgctgcccctggtgagcagccagtgcgtgaacctgaccaccaggacccagctgccccccgcctacaccaacagcttcaccaggggcgtgtactaccccgacaaggtgttcaggagcagcgtgctgcacagcacccaggacctgttcctgcccttcttcagcaacgtgacctggttccacgccatccacgtgagcggcaccaacggcaccaagaggttcgacaaccccgtgctgcccttcaacgacggcgtgtacttcgccagcaccgagaagagcaacatcatcaggggctggatcttcggcaccaccctggacagcaagacccagagcctgctgatcgtgaacaacgccaccaacgtggtgatcaaggtgtgcgagttccagttctgcaacgaccccttcctgggcgtgtactaccacaagaacaacaagagctggatggagagcgagttcagggtgtacagcagcgccaacaactgcaccttcgagtacgtgagccagcccttcctgatggacctggagggcaagcagggcaacttcaagaacctgagggagttcgtgttcaagaacatcgacggctacttcaagatctacagcaagcacacccccatcaacctggtgagggacctgccccagggcttcagcgccctggagcccctggtggacctgcccatcggcatcaacatcaccaggttccagaccctgctggccctgcacaggagctacctgacccccggcgacagcagcagcggctggaccgccggcgccgccgcctactacgtgggctacctgcagcccaggaccttcctgctgaagtacaacgagaacggcaccatcaccgacgccgtggactgcgccctggaccccctgagcgagaccaagtgcaccctgaagagcttcaccgtggagaagggcatctaccagaccagcaacttcagggtgcagcccaccgagagcatcgtgaggttccccaacatcaccaacctgtgccccttcggcgaggtgttcaacgccaccaggttcgccagcgtgtacgcctggaacaggaagaggatcagcaactgcgtggccgactacagcgtgctgtacaacagcgccagcttcagcaccttcaagtgctacggcgtgagccccaccaagctgaacgacctgtgcttcaccaacgtgtacgccgacagcttcgtgatcaggggcgacgaggtgaggcagatcgcccccggccagaccggcaagatcgccgactacaactacaagctgcccgacgacttcaccggctgcgtgatcgcctggaacagcaacaacctggacagcaaggtgggcggcaactacaactacctgtacaggctgttcaggaagagcaacctgaagcccttcgagagggacatcagcaccgagatctaccaggccggcagcaccccctgcaacggcgtggagggcttcaactgctacttccccctgcagagctacggcttccagcccaccaacggcgtgggctaccagccctacagggtggtggtgctgagcttcgagctgctgcacgcccccgccaccgtgtgcggccccaagaagagcaccaacctggtgaagaacaagtgcgtgaacttcaacttcaacggcctgaccggcaccggcgtgctgaccgagagcaacaagaagttcctgcccttccagcagttcggcagggacatcgccgacaccaccgacgccgtgagggacccccagaccctggagatcctggacatcaccccctgcagcttcggcggcgtgagcgtgatcacccccggcaccaacaccagcaaccaggtggccgtgctgtaccaggacgtgaactgcaccgaggtgcccgtggccatccacgccgaccagctgacccccacctggagggtgtacagcaccggcagcaacgtgttccagaccagggccggctgcctgatcggcgccgagcacgtgaacaacagctacgagtgcgacatccccatcggcgccggcatctgcgccagctaccagacccagaccaacagccccggcagcgccagcagcgtggccagccagagcatcatcgcctacaccatgagcctgggcgccgagaacagcgtggcctacagcaacaacagcatcgccatccccaccaacttcaccatcagcgtgaccaccgagatcctgcccgtgagcatgaccaagaccagcgtggactgcaccatgtacatctgcggcgacagcaccgagtgcagcaacctgctgctgcagtacggcagcttctgcacccagctgaacagggccctgaccggcatcgccgtggagcaggacaagaacacccaggaggtgttcgcccaggtgaagcagatctacaagaccccccccatcaaggacttcggcggcttcaacttcagccagatcctgcccgaccccagcaagcccagcaagaggagccccatcgaggacctgctgttcaacaaggtgaccctggccgacgccggcttcatcaagcagtacggcgactgcctgggcgacatcgccgccagggacctgatctgcgcccagaagttcaacggcctgaccgtgctgccccccctgctgaccgacgagatgatcgcccagtacaccagcgccctgctggccggcaccatcaccagcggctggaccttcggcgccggccccgccctgcagatccccttccccatgcagatggcctacaggttcaacggcatcggcgtgacccagaacgtgctgtacgagaaccagaagctgatcgccaaccagttcaacagcgccatcggcaagatccaggacagcctgagcagcacccccagcgccctgggcaagctgcaggacgtggtgaaccagaacgcccaggccctgaacaccctggtgaagcagctgagcagcaacttcggcgccatcagcagcgtgctgaacgacatcctgagcaggctggacccccccgaggccgaggtgcagatcgacaggctgatcaccggcaggctgcagagcctgcagacctacgtgacccagcagctgatcagggccgccgagatcagggccagcgccaacctggccgccaccaagatgagcgagtgcgtgctgggccagagcaagagggtggacttctgcggcaagggctaccacctgatgagcttcccccagagcgccccccacggcgtggtgttcctgcacgtgacctacgtgcccgcccaggagaagaacttcaccaccgcccccgccatctgccacgacggcaaggcccacttccccagggagggcgtgttcgtgagcaacggcacccactggttcgtgacccagaggaacttctacgagccccagatcatcaccaccgacaacaccttcgtgagcggcaactgcgacgtggtgatcggcatcgtgaacaacaccgtgtacgaccccctgcagcccgagctggacagcttcaaggaggagctggacaagtacttcaagaaccacaccagccccgacgtggacctgggcgacatcagcggcatcaacgccagcgtggtgaacatccagaaggagatcgacaggctgaacgaggtggccaagaacctgaacgagagcctgatcgacctgcaggagctgggcaagtacgagcagtacatcaagtggccctggtacatctggctgggcttcatcgccggcctgatcgccatcgtgatggtgaccatcatgctgtgctgcatgaccagctgctgcagctgcctgaagggctgctgcagctgcggcagctgctgcaagttcgacgaggacgacagcgagcccgtgctgaagggcgtgaagctgcactacaccggaagcggagccacgaacttctctctgttaaagcaagcaggagatgttgaagaaaaccccgggcctgcccccaccaaggtgaccttcggcgacgacaccgtgatcgaggtgcagggctacaagagcgtgaacatcaccttcgagctggacgagaggatcgacaaggtgctgaacgagaagtgcagcgcctacaccgtggagctgggcaccgaggtgaacgagttcgcctgcgtggtggccgacgccgtgatcaagaccctgcagcccgtgagcgagctgctgacccccctgggcatcgacctggacgagtggagcatggccacctactacctgttcgacgagagcggcgagttcaagctggccagccacatgtactgcagcttctacccccccgacgaggacgaggaggagggcgactgcgaggaggaggagttcgagcccagcacccagtacgagtacggcaccgaggacgactaccagggcaagcccctggagttcggcgccaccagcgccgccctgcagcccgaggaggagcaggaggaggactggctggacgacgacagccagcagaccgtgggccagcaggacggcagcgaggacaaccagaccaccaccatccagaccatcgtggaggtgcagccccagctggagatggagctgacccccgtggtgcagaccatcgaggtgaacagcttcagcggctacctgaagctgaccgacaacgtgtacatcaagaacgccgacatcgtggaggaggccaagaaggtgaagcccaccgtggtggtgaacgccgccaacgtgtacctgaagcacggcggcggcgtggccggcgccctgaacaaggccaccaacaacgccatgcaggtggagagcgacgactacatcgccaccaacggccccctgaaggtgggcggcagctgcgtgctgagcggccacaacctggccaagcactgcctgcacgtggtgggccccaacgtgaacaagggcgaggacatccagctgctgaagagcgcctacgagaacttcaaccagcacgaggtgctgctggcccccctgctgagcgccggcatcttcggcgccgaccccatccacagcctgagggtgtgcgtggacaccgtgaggaccaacgtgtacctggccgtgttcgacaagaacctgtacgacaagctggtgagcagcttcctggagatgaagagcgagaagcaggtggagcagaagatcgccgagatccccaaggaggaggtgaagcccttcatcaccgagagcaagcccagcgtggagcagaggaagcaggacgacaagaagatcaaggcctgcgtggaggaggtgaccaccaccctggaggagaccaagttcctgaccgagaacctgctgctgtacatcgacatcaacggcaacctgcaccccgacagcgccaccctggtgagcgacatcgacatcaccttcctgaagaaggacgccccctacatcgtgggcgacgtggtgcaggagggcgtgctgaccgccgtggtgatccccaccaagaaggccggcggcaccaccgagatgctggccaaggccctgaggaaggtgcccaccgacaactacatcaccacctaccccggccagggcctgaacggctacaccgtggaggaggccaagaccgtgctgaagaagtgcaagagcgccttctacatcctgcccagcatcatcagcaacgagaagcaggagatcctgggcaccgtgagctggaacctgagggagatgctggcccacgccgaggagaccaggaagctgatgcccgtgtgcgtggagaccaaggccatcgtgagcaccatccagaggaagtacaagggcatcaagatccaggagggcgtggtggactacggcgccaggttctacttctacaccagcaagaccaccgtggccagcctgatcaacaccctgaacgacctgaacgagaccctggtgaccatgcccctgggctacgtgacccacggcctgaacctggaggaggccgccaggtacatgaggagcctgaaggtgcccgccaccgtgagcgtgagcagccccgacgccgtgaccgcctacaacggctacctgaccagcagcagcaagacccccgaggagcacttcatcgagaccatcagcctggccggcagctacaaggactggagctacagcggccagagcacccagctgggcatcgagttcctgaagaggggcgacaagagcgtgtactacaccagcaaccccaccaccttccacctggacggcgaggtgatcaccttcgacaacctgaagaccctgctgagcctgagggaggtgaggaccatcaaggtgttcaccaccgtggacaacatcaacctgcactgatga

SEQ ID NO: 345 - DNA, 4809 bp, synthetic construct
  source 1..4809: mol_type = other DNA; note = Synthesized Vaccine Candidate 60
atgttcgtgttcctggtgctgctgcccctggtgagcagccagtgcgtgaacctgaccaccaggacccagctgccccccgcctacaccaacagcttcaccaggggcgtgtactaccccgacaaggtgttcaggagcagcgtgctgcacagcacccaggacctgttcctgcccttcttcagcaacgtgacctggttccacgccatccacgtgagcggcaccaacggcaccaagaggttcgacaaccccgtgctgcccttcaacgacggcgtgtacttcgccagcaccgagaagagcaacatcatcaggggctggatcttcggcaccaccctggacagcaagacccagagcctgctgatcgtgaacaacgccaccaacgtggtgatcaaggtgtgcgagttccagttctgcaacgaccccttcctgggcgtgtactaccacaagaacaacaagagctggatggagagcgagttcagggtgtacagcagcgccaacaactgcaccttcgagtacgtgagccagcccttcctgatggacctggagggcaagcagggcaacttcaagaacctgagggagttcgtgttcaagaacatcgacggctacttcaagatctacagcaagcacacccccatcaacctggtgagggacctgccccagggcttcagcgccctggagcccctggtggacctgcccatcggcatcaacatcaccaggttccagaccctgctggccctgcacaggagctacctgacccccggcgacagcagcagcggctggaccgccggcgccgccgcctactacgtgggctacctgcagcccaggaccttcctgctgaagtacaacgagaacggcaccatcaccgacgccgtggactgcgccctggaccccctgagcgagaccaagtgcaccctgaagagcttcaccgtggagaagggcatctaccagaccagcaacttcagggtgcagcccaccgagagcatcgtgaggttccccaacatcaccaacctgtgccccttcggcgaggtgttcaacgccaccaggttcgccagcgtgtacgcctggaacaggaagaggatcagcaactgcgtggccgactacagcgtgctgtacaacagcgccagcttcagcaccttcaagtgctacggcgtgagccccaccaagctgaacgacctgtgcttcaccaacgtgtacgccgacagcttcgtgatcaggggcgacgaggtgaggcagatcgcccccggccagaccggcaagatcgccgactacaactacaagctgcccgacgacttcaccggctgcgtgatcgcctggaacagcaacaacctggacagcaaggtgggcggcaactacaactacctgtacaggctgttcaggaagagcaacctgaagcccttcgagagggacatcagcaccgagatctaccaggccggcagcaccccctgcaacggcgtggagggcttcaactgctacttccccctgcagagctacggcttccagcccaccaacggcgtgggctaccagccctacagggtggtggtgctgagcttcgagctgctgcacgcccccgccaccgtgtgcggccccaagaagagcaccaacctggtgaagaacaagtgcgtgaacttcaacttcaacggcctgaccggcaccggcgtgctgaccgagagcaacaagaagttcctgcccttccagcagttcggcagggacatcgccgacaccaccgacgccgtgagggacccccagaccctggagatcctggacatcaccccctgcagcttcggcggcgtgagcgtgatcacccccggcaccaacaccagcaaccaggtggccgtgctgtaccaggacgtgaactgcaccgaggtgcccgtggccatccacgccgaccagctgacccccacctggagggtgtacagcaccggcagcaacgtgttccagaccagggccggctgcctgatcggcgccgagcacgtgaacaacagctacgagtgcgacatccccatcggcgccggcatctgcgccagctaccagacccagaccaacagccccggcagcgccagcagcgtggccagccagagcatcatcgcctacaccatgagcctgggcgccgagaacagcgtggcctacagcaacaacagcatcgccatccccaccaacttcaccatcagcgtgaccaccgagatcctgcccgtgagcatgaccaagaccagcgtggactgcaccatgtacatctgcggcgacagcaccgagtgcagcaacctgctgctgcagtacggcagcttctgcacccagctgaacagggccctgaccggcatcgccgtggagcaggacaagaacacccaggaggtgttcgcccaggtgaagcagatctacaagaccccccccatcaaggacttcggcggcttcaacttcagccagatcctgcccgaccccagcaagcccagcaagaggagccccatcgaggacctgctgttcaacaaggtgaccctggccgacgccggcttcatcaagcagtacggcgactgcctgggcgacatcgccgccagggacctgatctgcgcccagaagttcaacggcctgaccgtgctgccccccctgctgaccgacgagatgatcgcccagtacaccagcgccctgctggccggcaccatcaccagcggctggaccttcggcgccggccccgccctgcagatccccttccccatgcagatggcctacaggttcaacggcatcggcgtgacccagaacgtgctgtacgagaaccagaagctgatcgccaaccagttcaacagcgccatcggcaagatccaggacagcctgagcagcacccccagcgccctgggcaagctgcaggacgtggtgaaccagaacgcccaggccctgaacaccctggtgaagcagctgagcagcaacttcggcgccatcagcagcgtgctgaacgacatcctgagcaggctggacccccccgaggccgaggtgcagatcgacaggctgatcaccggcaggctgcagagcctgcagacctacgtgacccagcagctgatcagggccgccgagatcagggccagcgccaacctggccgccaccaagatgagcgagtgcgtgctgggccagagcaagagggtggacttctgcggcaagggctaccacctgatgagcttcccccagagcgccccccacggcgtggtgttcctgcacgtgacctacgtgcccgcccaggagaagaacttcaccaccgcccccgccatctgccacgacggcaaggcccacttccccagggagggcgtgttcgtgagcaacggcacccactggttcgtgacccagaggaacttctacgagccccagatcatcaccaccgacaacaccttcgtgagcggcaactgcgacgtggtgatcggcatcgtgaacaacaccgtgtacgaccccctgcagcccgagctggacagcttcaaggaggagctggacaagtacttcaagaaccacaccagccccgacgtggacctgggcgacatcagcggcatcaacgccagcgtggtgaacatccagaaggagatcgacaggctgaacgaggtggccaagaacctgaacgagagcctgatcgacctgcaggagctgggcaagtacgagcagtacatcaagtggccctggtacatctggctgggcttcatcgccggcctgatcgccatcgtgatggtgaccatcatgctgtgctgcatgaccagctgctgcagctgcctgaagggctgctgcagctgcggcagctgctgcaagttcgacgaggacgacagcgagcccgtgctgaagggcgtgaagctgcactacaccggaagcggagccacgaacttctctctgttaaagcaagcaggagatgttgaagaaaaccccgggcctagcggcttcaggaagatggccttccccagcggcaaggtggagggctgcatggtgcaggtgacctgcggcaccaccaccctgaacggcctgtggctggacgacgtggtgtactgccccaggcacgtgatctgcaccagcgaggacatgctgaaccccaactacgaggacctgctgatcaggaagagcaaccacaacttcctggtgcaggccggcaacgtgcagctgagggtgatcggccacagcatgcagaactgcgtgctgaagctgaaggtggacaccgccaaccccaagacccccaagtacaagttcgtgaggatccagcccggccagaccttcagcgtgctggcctgctacaacggcagccccagcggcgtgtaccagtgcgccatgaggcccaacttcaccatcaagggcagcttcctgaacggcagctgcggcagcgtgggcttcaacatcgactacgactgcgtgagcttctgctacatgcaccacatggagctgcccaccggcgtgcacgccggcaccgacctggagggcaacttctacggccccttcgtggacaggcagaccgcccaggccgccggcaccgacaccaccatcaccgtgaacgtgctggcctggctgtacgccgccgtgatcaacggcgacaggtggttcctgaacaggttcaccaccaccctgaacgacttcaacctggtggccatgaagtacaactacgagcccctgacccaggaccacgtggacatcctgggccccctgagcgcccagaccggcatcgccgtgctggacatgtgcgccagcctgaaggagctgctgcagaacggcatgaacggcaggaccatcctgggcagcgccctgctggaggacgagttcacccccttcgacgtggtgaggcagtgcagcggcgtgaccttccagtgatga

SEQ ID NO: 346 - DNA, 6687 bp, synthetic construct
  source 1..6687: mol_type = other DNA; note = Synthesized Vaccine Candidate 61
atgttcgtgttcctggtgctgctgcccctggtgagcagccagtgcgtgaacctgaccaccaggacccagctgccccccgcctacaccaacagcttcaccaggggcgtgtactaccccgacaaggtgttcaggagcagcgtgctgcacagcacccaggacctgttcctgcccttcttcagcaacgtgacctggttccacgccatccacgtgagcggcaccaacggcaccaagaggttcgacaaccccgtgctgcccttcaacgacggcgtgtacttcgccagcaccgagaagagcaacatcatcaggggctggatcttcggcaccaccctggacagcaagacccagagcctgctgatcgtgaacaacgccaccaacgtggtgatcaaggtgtgcgagttccagttctgcaacgaccccttcctgggcgtgtactaccacaagaacaacaagagctggatggagagcgagttcagggtgtacagcagcgccaacaactgcaccttcgagtacgtgagccagcccttcctgatggacctggagggcaagcagggcaacttcaagaacctgagggagttcgtgttcaagaacatcgacggctacttcaagatctacagcaagcacacccccatcaacctggtgagggacctgccccagggcttcagcgccctggagcccctggtggacctgcccatcggcatcaacatcaccaggttccagaccctgctggccctgcacaggagctacctgacccccggcgacagcagcagcggctggaccgccggcgccgccgcctactacgtgggctacctgcagcccaggaccttcctgctgaagtacaacgagaacggcaccatcaccgacgccgtggactgcgccctggaccccctgagcgagaccaagtgcaccctgaagagcttcaccgtggagaagggcatctaccagaccagcaacttcagggtgcagcccaccgagagcatcgtgaggttccccaacatcaccaacctgtgccccttcggcgaggtgttcaacgccaccaggttcgccagcgtgtacgcctggaacaggaagaggatcagcaactgcgtggccgactacagcgtgctgtacaacagcgccagcttcagcaccttcaagtgctacggcgtgagccccaccaagctgaacgacctgtgcttcaccaacgtgtacgccgacagcttcgtgatcaggggcgacgaggtgaggcagatcgcccccggccagaccggcaagatcgccgactacaactacaagctgcccgacgacttcaccggctgcgtgatcgcctggaacagcaacaacctggacagcaaggtgggcggcaactacaactacctgtacaggctgttcaggaagagcaacctgaagcccttcgagagggacatcagcaccgagatctaccaggccggcagcaccccctgcaacggcgtggagggcttcaactgctacttccccctgcagagctacggcttccagcccaccaacggcgtgggctaccagccctacagggtggtggtgctgagcttcgagctgctgcacgcccccgccaccgtgtgcggccccaagaagagcaccaacctggtgaagaacaagtgcgtgaacttcaacttcaacggcctgaccggcaccggcgtgctgaccgagagcaacaagaagttcctgcccttccagcagttcggcagggacatcgccgacaccaccgacgccgtgagggacccccagaccctggagatcctggacatcaccccctgcagcttcggcggcgtgagcgtgatcacccccggcaccaacaccagcaaccaggtggccgtgctgtaccaggacgtgaactgcaccgaggtgcccgtggccatccacgccgaccagctgacccccacctggagggtgtacagcaccggcagcaacgtgttccagaccagggccggctgcctgatcggcgccgagcacgtgaacaacagctacgagtgcgacatccccatcggcgccggcatctgcgccagctaccagacccagaccaacagccccggcagcgccagcagcgtggccagccagagcatcatcgcctacaccatgagcctgggcgccgagaacagcgtggcctacagcaacaacagcatcgccatccccaccaacttcaccatcagcgtgaccaccgagatcctgcccgtgagcatgaccaagaccagcgtggactgcaccatgtacatctgcggcgacagcaccgagtgcagcaacctgctgctgcagtacggcagcttctgcacccagctgaacagggccctgaccggcatcgccgtggagcaggacaagaacacccaggaggtgttcgcccaggtgaagcagatctacaagaccccccccatcaaggacttcggcggcttcaacttcagccagatcctgcccgaccccagcaagcccagcaagaggagccccatcgaggacctgctgttcaacaaggtgaccctggccgacgccggcttcatcaagcagtacggcgactgcctgggcgacatcgccgccagggacctgatctgcgcccagaagttcaacggcctgaccgtgctgccccccctgctgaccgacgagatgatcgcccagtacaccagcgccctgctggccggcaccatcaccagcggctggaccttcggcgccggccccgccctgcagatccccttccccatgcagatggcctacaggttcaacggcatcggcgtgacccagaacgtgctgtacgagaaccagaagctgatcgccaaccagttcaacagcgccatcggcaagatccaggacagcctgagcagcacccccagcgccctgggcaagctgcaggacgtggtgaaccagaacgcccaggccctgaacaccctggtgaagcagctgagcagcaacttcggcgccatcagcagcgtgctgaacgacatcctgagcaggctggacccccccgaggccgaggtgcagatcgacaggctgatcaccggcaggctgcagagcctgcagacctacgtgacccagcagctgatcagggccgccgagatcagggccagcgccaacctggccgccaccaagatgagcgagtgcgtgctgggccagagcaagagggtggacttctgcggcaagggctaccacctgatgagcttcccccagagcgccccccacggcgtggtgttcctgcacgtgacctacgtgcccgcccaggagaagaacttcaccaccgcccccgccatctgccacgacggcaaggcccacttccccagggagggcgtgttcgtgagcaacggcacccactggttcgtgacccagaggaacttctacgagccccagatcatcaccaccgacaacaccttcgtgagcggcaactgcgacgtggtgatcggcatcgtgaacaacaccgtgtacgaccccctgcagcccgagctggacagcttcaaggaggagctggacaagtacttcaagaaccacaccagccccgacgtggacctgggcgacatcagcggcatcaacgccagcgtggtgaacatccagaaggagatcgacaggctgaacgaggtggccaagaacctgaacgagagcctgatcgacctgcaggagctgggcaagtacgagcagtacatcaagtggccctggtacatctggctgggcttcatcgccggcctgatcgccatcgtgatggtgaccatcatgctgtgctgcatgaccagctgctgcagctgcctgaagggctgctgcagctgcggcagctgctgcaagttcgacgaggacgacagcgagcccgtgctgaagggcgtgaagctgcactacaccggaagcggagccacgaacttctctctgttaaagcaagcaggagatgttgaagaaaaccccgggcctagcgccgacgcccagagcttcctgaacagggtgtgcggcgtgagcgccgccaggctgaccccctgcggcaccggcaccagcaccgacgtggtgtacagggccttcgacatctacaacgacaaggtggccggcttcgccaagttcctgaagaccaactgctgcaggttccaggagaaggacgaggacgacaacctgatcgacagctacttcgtggtgaagaggcacaccttcagcaactaccagcacgaggagaccatctacaacctgctgaaggactgccccgccgtggccaagcacgacttcttcaagttcaggatcgacggcgacatggtgccccacatcagcaggcagaggctgaccaagtacaccatggccgacctggtgtacgccctgaggcacttcgacgagggcaactgcgacaccctgaaggagatcctggtgacctacaactgctgcgacgacgactacttcaacaagaaggactggtacgacttcgtggagaaccccgacatcctgagggtgtacgccaacctgggcgagagggtgaggcaggccctgctgaagaccgtgcagttctgcgacgccatgaggaacgccggcatcgtgggcgtgctgaccctggacaaccaggacctgaacggcaactggtacgacttcggcgacttcatccagaccacccccggcagcggcgtgcccgtggtggacagctactacagcctgctgatgcccatcctgaccctgaccagggccctgaccgccgagagccacgtggacaccgacctgaccaagccctacatcaagtgggacctgctgaagtacgacttcaccgaggagaggctgaagctgttcgacaggtacttcaagtactgggaccagacctaccaccccaactgcgtgaactgcctggacgacaggtgcatcctgcactgcgccaacttcaacgtgctgttcagcaccgtgttcccccccaccagcttcggccccctggtgaggaagatcttcgtggacggcgtgcccttcgtggtgagcaccggctaccacttcagggagctgggcgtggtgcacaaccaggacgtgaacctgcacagcagcaggctgagcttcaaggagctgctggtgtacgccgccgaccccgccatgcacgccgccagcggcaacctgctgctggacaagaggaccacctgcttcagcgtggccgccctgaccaacaacgtggccttccagaccgtgaagcccggcaacttcaacaaggacttctacgacttcgccgtgagcaagggcttcttcaaggagggcagcagcgtggagctgaagcacttcttcttcgcccaggacggcaacgccgccatcagcgactacgactactacaggtacaacctgcccaccatgtgcgacatcaggcagctgctgttcgtggtggaggtggtggacaagtacttcgactgctacgacggcggctgcatcaacgccaaccaggtgatcgtgaacaacctggacaagagcgccggcttccccttcaacaagtggggcaaggccaggctgtactacgacagcatgagctacgaggaccaggacgccctgttcgcctacaccaagaggaacgtgatccccaccatcacccagatgaacctgaagtacgccatcagcgccaagaacagggccaggaccgtggccggcgtgagcatctgcagcaccatgaccaacaggcagttccaccagaagctgctgaagagcatcgccgccaccaggggcgccaccgtggtgatcggcaccagcaagttctacggcggctggcacaacatgctgaagaccgtgtacagcgacgtggagaacccccacctgatgggctgggactaccccaagtgcgacagggccatgcccaacatgctgaggatcatggccagcctggtgctggccaggaagcacaccacctgctgcagcctgagccacaggttctacaggctggccaacgagtgcgcccaggtgctgagcgagatggtgatgtgcggcggcagcctgtacgtgaagcccggcggcaccagcagcggcgacgccaccaccgcctacgccaacagcgtgttcaacatctgccaggccgtgaccgccaacgtgaacgccctgctgagcaccgacggcaacaagatcgccgacaagtacgtgaggaacctgcagcacaggctgtacgagtgcctgtacaggaacagggacgtggacaccgacttcgtgaacgagttctacgcctacctgaggaagcacttcagcatgatgatcctgagcgacgacgccgtggtgtgcttcaacagcacctacgccagccagggcctggtggccagcatcaagaacttcaagagcgtgctgtactaccagaacaacgtgttcatgagcgaggccaagtgctggaccgagaccgacctgaccaagggcccccacgagttctgcagccagcacaccatgctggtgaagcagggcgacgactacgtgtacctgccctaccccgaccccagcaggatcctgggcgccggctgcttcgtggacgacatcgtgaagaccgacggcaccctgatgatcgagaggttcgtgagcctggccatcgacgcctaccccctgaccaagcaccccaaccaggagtacgccgacgtgttccacctgtacctgcagtacatcaggaagctgcacgacgagctgaccggccacatgctggacatgtacagcgtgatgctgaccaacgacaacaccagcaggtactgggagcccgagttctacgaggccatgtacaccccccacaccgtgctgcagtgatga

SEQ ID NO: 347 - DNA, 1263 bp, synthetic construct
  source 1..1263: mol_type = other DNA; note = Synthesized Vaccine Candidate 62
atgagcgacaacggcccccagaaccagaggaacgcccccaggatcaccttcggcggccccagcgacagcaccggcagcaaccagaacggcgagaggagcggcgccaggagcaagcagaggaggccccagggcctgcccaacaacaccgccagctggttcaccgccctgacccagcacggcaaggaggacctgaagttccccaggggccagggcgtgcccatcaacaccaacagcagccccgacgaccagatcggctactacaggagggccaccaggaggatcaggggcggcgacggcaagatgaaggacctgagccccaggtggtacttctactacctgggcaccggccccgaggccggcctgccctacggcgccaacaaggacggcatcatctgggtggccaccgagggcgccctgaacacccccaaggaccacatcggcaccaggaaccccgccaacaacgccgccatcgtgctgcagctgccccagggcaccaccctgcccaagggcttctacgccgagggcagcaggggcggcagccaggccagcagcaggagcagcagcaggagcaggaacagcagcaggaacagcacccccggcagcagcaggggcaccagccccgccaggatggccggcaacggcggcgacgccgccctggccctgctgctgctggacaggctgaaccagctggagagcaagatgagcggcaagggccagcagcagcagggccagaccgtgaccaagaagagcgccgccgaggccagcaagaagcccaggcagaagaggaccgccaccaaggcctacaacgtgacccaggccttcggcaggaggggccccgagcagacccagggcaacttcggcgaccaggagctgatcaggcagggcaccgactacaagcactggccccagatcgcccagttcgcccccagcgccagcgccttcttcggcatgagcaggatcggcatggaggtgacccccagcggcacctggctgacctacaccggcgccatcaagctggacgacaaggaccccaacttcaaggaccaggtgatcctgctgaacaagcacatcgacgcctacaagaccttcccccccaccgagcccaagaaggacaagaagaagaaggccgacgagacccaggccctgccccagaggcagaagaagcagcagaccgtgaccctgctgcccgccgccgacctggacgacttcagcaagcagctgcagcagagcatgagcagcgccgacagcacccaggcctgatga

SEQ ID NO: 348 - DNA, 3684 bp, synthetic construct
  source 1..3684: mol_type = other DNA; note = Orf1a/b from SARS-CoV-2
gaccaggaaccccgcctggaggaaggccgtgttcatcagcccctacaacagccagaacgccgtggccagcaagatcctgggcctgcccacccagaccgtggacagcagccagggcagcgagtacgactacgtgatcttcacccagaccaccgagaccgcccacagctgcaacgtgaacaggttcaacgtggccatcaccagggccaaggtgggcatcctgtgcatcatgagcgacagggacctgtacgacaagctgcagttcaccagcctggagatccccaggaggaacgtggccaccctgcaggccgagaacgtgaccggcctgttcaaggactgcagcaaggtgatcaccggcctgcaccccacccaggcccccacccacctgagcgtggacaccaagttcaagaccgagggcctgtgcgtggacatccccggcatccccaaggacatgacctacaggaggctgatcagcatgatgggcttcaagatgaactaccaggtgaacggctaccccaacatgttcatcaccagggaggaggccatcaggcacgtgagggcctggatcggcttcgacgtggagggctgccacgccaccagggaggccgtgggcaccaacctgcccctgcagctgggcttcagcaccggcgtgaacctggtggccgtgcccaccggctacgtggacacccccaacaacaccgacttcagcagggtgagcgccaagcccccccccggcgaccagttcaagcacctgatccccctgatgtacaagggcctgccctggaacgtggtgaggatcaagatcgtgcagatgctgagcgacaccctgaagaacctgagcgacagggtggtgttcgtgctgtgggcccacggcttcgagctgaccagcatgaagtacttcgtgaagatcggccccgagaggacctgctgcctgtgcgacaggagggccacctgcttcagcaccgccagcgacacctacgcctgctggcaccacagcatcggcttcgactacgtgtacaaccccttcatgatcgacgtgcagcagtggggcttcaccggcaacctgcagagcaaccacgacctgtactgccaggtgcacggcaacgcccacgtggccagctgcgacgccatcatgaccaggtgcctggccgtgcacgagtgcttcgtgaagagggtggactggaccatcgagtaccccatcatcggcgacgagctgaagatcaacgccgcctgcaggaaggtgcagcacatggtggtgaaggccgccctgctggccgacaagttccccgtgctgcacgacatcggcaaccccaaggccatcaagtgcgtgccccaggccgacgtggagtggaagttctacgacgcccagccctgcagcgacaaggcctacaagatcgaggagctgttctacagctacgccacccacagcgacaagttcaccgacggcgtgtgcctgttctggaactgcaacgtggacaggtaccccgccaacagcatcgtgtgcaggttcgacaccagggtgctgagcaacctgaacctgcccggctgcgacggcggcagcctgtacgtgaacaagcacgccttccacacccccgccttcgacaagagcgccttcgtgaacctgaagcagctgcccttcttctactacagcgacagcccctgcgagagccacggcaagcaggtggtgagcgacatcgactacgtgcccctgaagagcgccacctgcatcaccaggtgcaacctgggcggcgccgtgtgcaggcaccacgccaacgagtacaggctgtacctggacgcctacaacatgatgatcagcgccggcttcagcctgtgggtgtacaagcagttcgacacctacaacctgtggaacaccttcaccaggctgcagagcctggagaacgtggccttcaacgtggtgaacaagggccacttcgacggccagcagggcgaggtgcccgtgagcatcatcaacaacaccgtgtacaccaaggtggacggcgtggacgtggagctgttcgagaacaagaccaccctgcccgtgaacgtggccttcgagctgtgggccaagaggaacatcaagcccgtgcccgaggtgaagatcctgaacaacctgggcgtggacatcgccgccaacaccgtgatctgggactacaagagggacgcccccgcccacatcagcaccatcggcgtgtgcagcatgaccgacatcgccaagaagcccaccgagaccatctgcgcccccctgaccgtgttcttcgacggcagggtggacggccaggtggacctgttcaggaacgccaggaacggcgtgctgatcaccgagggcagcgtgaagggcctgcagcccagcgtgggccccaagcaggccagcctgaacggcgtgaccctgatcggcgaggccgtgaagacccagttcaactactacaagaaggtggacggcgtggtgcagcagctgcccgagacctacttcacccagagcaggaacctgcaggagttcaagcccaggagccagatggagatcgacttcctggagctggccatggacgagttcatcgagaggtacaagctggagggctacgccttcgagcacatcgtgtacggcgacttcagccacagccagctgggcggcctgcacctgctgatcggcctggccaagaggttcaaggagagccccttcgagctggaggacttcatccccatggacagcaccgtgaagaactacttcatcaccgacgcccagaccggcagcagcaagtgcgtgtgcagcgtgatcgacctgctgctggacgacttcgtggagatcatcaagagccaggacctgagcgtggtgagcaaggtggtgaaggtgaccatcgactacaccgagatcagcttcatgctgtggtgcaaggacggccacgtggagaccttctaccccaagctgcagagcagccaggcctggcagcccggcgtggccatgcccaacctgtacaagatgcagaggatgctgctggagaagtgcgacctgcagaactacggcgacagcgccaccctgcccaagggcatcatgatgaacgtggccaagtacacccagctgtgccagtacctgaacaccctgaccctggccgtgccctacaacatgagggtgatccacttcggcgccggcagcgacaagggcgtggcccccggcaccgccgtgctgaggcagtggctgcccaccggcaccctgctggtggacagcgacctgaacgacttcgtgagcgacgccgacagcaccctgatcggcgactgcgccaccgtgcacaccgccaacaagtgggacctgatcatcagcgacatgtacgaccccaagaccaagaacgtgaccaaggagaacgacagcaaggagggcttcttcacctacatctgcggcttcatccagcagaagctggccctgggcggcagcgtggccatcaagatcaccgagcacagctggaacgccgacctgtacaagctgatgggccacttcgcctggtggaccgccttcgtgaccaacgtgaacgccagcagcagcgaggccttcctgatcggctgcaactacctgggcaagcccagggagcagatcgacggctacgtgatgcacgccaactacatcttctggaggaacaccaaccccatccagctgagcagctacagcctgttcgacatgagcaagttccccctgaagct

SEQ ID NO: 349 - DNA, 540 bp, synthetic construct
  source 1..540: mol_type = other DNA; note = NSP1 from SARS-CoV-2
atggagagcctggtgcccggcttcaacgagaagacccacgtgcagctgagcctgcccgtgctgcaggtgagggacgtgctggtgaggggcttcggcgacagcgtggaggaggtgctgagcgaggccaggcagcacctgaaggacggcacctgcggcctggtggaggtggagaagggcgtgctgccccagctggagcagccctacgtgttcatcaagaggagcgacgccaggaccgccccccacggccacgtgatggtggagctggtggccgagctggagggcatccagtacggcaggagcggcgagaccctgggcgtgctggtgccccacgtgggcgagatccccgtggcctacaggaaggtgctgctgaggaagaacggcaacaagggcgccggcggccacagctacggcgccgacctgaagagcttcgacctgggcgacgagctgggcaccgacccctacgaggacttccaggagaactggaacaccaagcacagcagcggcgtgaccagggagctgatgagggagctgaacggcggc

SEQ ID NO: 350 - DNA, 1914 bp, synthetic construct
  source 1..1914: mol_type = other DNA; note = NSP2 from SARS-CoV-2
gcctacaccaggtacgtggacaacaacttctgcggccccgacggctaccccctggagtgcatcaaggacctgctggccagggccggcaaggccagctgcaccctgagcgagcagctggacttcatcgacaccaagaggggcgtgtactgctgcagggagcacgagcacgagatcgcctggtacaccgagaggagcgagaagagctacgagctgcagacccccttcgagatcaagctggccaagaagttcgacaccttcaacggcgagtgccccaacttcgtgttccccctgaacagcatcatcaagaccatccagcccagggtggagaagaagaagctggacggcttcatgggcaggatcaggagcgtgtaccccgtggccagccccaacgagtgcaaccagatgtgcctgagcaccctgatgaagtgcgaccactgcggcgagaccagctggcagaccggcgacttcgtgaaggccacctgcgagttctgcggcaccgagaacctgaccaaggagggcgccaccacctgcggctacctgccccagaacgccgtggtgaagatctactgccccgcctgccacaacagcgaggtgggccccgagcacagcctggccgagtaccacaacgagagcggcctgaagaccatcctgaggaagggcggcaggaccatcgccttcggcggctgcgtgttcagctacgtgggctgccacaacaagtgcgcctactgggtgcccagggccagcgccaacatcggctgcaaccacaccggcgtggtgggcgagggcagcgagggcctgaacgacaacctgctggagatcctgcagaaggagaaggtgaacatcaacatcgtgggcgacttcaagctgaacgaggagatcgccatcatcctggccagcttcagcgccagcaccagcgccttcgtggagaccgtgaagggcctggactacaaggccttcaagcagatcgtggagagctgcggcaacttcaaggtgaccaagggcaaggccaagaagggcgcctggaacatcggcgagcagaagagcatcctgagccccctgtacgccttcgccagcgaggccgccagggtggtgaggagcatcttcagcaggaccctggagaccgcccagaacagcgtgagggtgctgcagaaggccgccatcaccatcctggacggcatcagccagtacagcctgaggctgatcgacgccatgatgttcaccagcgacctggccaccaacaacctggtggtgatggcctacatcaccggcggcgtggtgcagctgaccagccagtggctgaccaacatcttcggcaccgtgtacgagaagctgaagcccgtgctggactggctggaggagaagttcaaggagggcgtggagttcctgagggacggctgggagatcgtgaagttcatcagcacctgcgcctgcgagatcgtgggcggccagatcgtgacctgcgccaaggagatcaaggagagcgtgcagaccttcttcaagctggtgaacaagttcctggccctgtgcgccgacagcatcatcatcggcggcgccaagctgaaggccctgaacctgggcgagaccttcgtgacccacagcaagggcctgtacaggaagtgcgtgaagagcagggaggagaccggcctgctgatgcccctgaaggcccccaaggagatcatcttcctggagggcgagaccctgcccaccgaggtgctgaccgaggaggtggtgctgaagaccggcgacctgcagcccctggagcagcccaccagcgaggccgtggaggcccccctggtgggcacccccgtgtgcatcaacggcctgatgctgctggagatcaaggacaccgagaagtactgcgccctggcccccaacatgatggtgaccaacaacaccttcaccctgaagggcggc

SEQ ID NO: 351 - DNA, 870 bp, synthetic construct
  source 1..870: mol_type = other DNA; note = NSP6 from SARS-CoV-2
agcgccgtgaagaggaccatcaagggcacccaccactggctgctgctgaccatcctgaccagcctgctggtgctggtgcagagcacccagtggagcctgttcttcttcctgtacgagaacgccttcctgcccttcgccatgggcatcatcgccatgagcgccttcgccatgatgttcgtgaagcacaagcacgccttcctgtgcctgttcctgctgcccagcctggccaccgtggcctacttcaacatggtgtacatgcccgccagctgggtgatgaggatcatgacctggctggacatggtggacaccagcctgagcggcttcaagctgaaggactgcgtgatgtacgccagcgccgtggtgctgctgatcctgatgaccgccaggaccgtgtacgacgacggcgccaggagggtgtggaccctgatgaacgtgctgaccctggtgtacaaggtgtactacggcaacgccctggaccaggccatcagcatgtgggccctgatcatcagcgtgaccagcaactacagcggcgtggtgaccaccgtgatgttcctggccaggggcatcgtgttcatgtgcgtggagtactgccccatcttcttcatcaccggcaacaccctgcagtgcatcatgctggtgtactgcttcctgggctacttctgcacctgctacttcggcctgttctgcctgctgaacaggtacttcaggctgaccctgggcgtgtacgactacctggtgagcacccaggagttcaggtacatgaacagccagggcctgctgccccccaagaacagcatcgacgccttcaagctgaacatcaagctgctgggcgtgggcggcaagccctgcatcaaggtggccaccgtgcag

SEQ ID NO: 352 - DNA, 249 bp, synthetic construct
  source 1..249: mol_type = other DNA; note = NSP7 from SARS-CoV-2
agcaagatgagcgacgtgaagtgcaccagcgtggtgctgctgagcgtgctgcagcagctgagggtggagagcagcagcaagctgtgggcccagtgcgtgcagctgcacaacgacatcctgctggccaaggacaccaccgaggccttcgagaagatggtgagcctgctgagcgtgctgctgagcatgcagggcgccgtggacatcaacaagctgtgcgaggagatgctggacaacagggccaccctgcag

SEQ ID NO: 353 - DNA, 593 bp, synthetic construct
  source 1..593: mol_type = other DNA; note = NSP8 from SARS-CoV-2
gccatcgccagcgagttcagcagcctgcccagctacgccgccttcgccaccgcccaggaggcctacgagcaggccgtggccaacggcgacagcgaggtggtgctgaagaagctgaagaagagcctgaacgtggccaagagcgagttcgacagggacgccgccatgcagaggaagctggagaagatggccgaccaggccatgacccagatgtacaagcaggccaggagcgaggacaagagggccaaggtgaccagcgccatgcagaccatgctgttcaccatgctgaggaagctggacaacgacgccctgaacaacatcatcaacaacgccagggacggctgcgtgcccctgaacatcatccccctgaccaccgccgccaagctgatggtggtgatccccgactacaacacctacaagaacacctgcgacggcaccaccttcacctacgccagcgccctgtgggagatccagcaggtggtggacgccgacagcaagatcgtgcagctgagcgagatcagcatggacaacagccccaacctggcctggcccctgatcgtgaccgccctgagggccaacagcgccgtgaagctgca

SEQ ID NO: 354 - DNA, 339 bp, synthetic construct
  source 1..339: mol_type = other DNA; note = NSP9 from SARS-CoV-2
aacaacgagctgagccccgtggccctgaggcagatgagctgcgccgccggcaccacccagaccgcctgcaccgacgacaacgccctggcctactacaacaccaccaagggcggcaggttcgtgctggccctgctgagcgacctgcaggacctgaagtgggccaggttccccaagagcgacggcaccggcaccatctacaccgagctggagcccccctgcaggttcgtgaccgacacccccaagggccccaaggtgaagtacctgtacttcatcaagggcctgaacaacctgaacaggggcatggtgctgggcagcctggccgccaccgtgaggctgcag

SEQ ID NO: 355 - DNA, 417 bp, synthetic construct
  source 1..417: mol_type = other DNA; note = NSP10 from SARS-CoV-2
gccggcaacgccaccgaggtgcccgccaacagcaccgtgctgagcttctgcgccttcgccgtggacgccgccaaggcctacaaggactacctggccagcggcggccagcccatcaccaactgcgtgaagatgctgtgcacccacaccggcaccggccaggccatcaccgtgacccccgaggccaacatggaccaggagagcttcggcggcgccagctgctgcctgtactgcaggtgccacatcgaccaccccaaccccaagggcttctgcgacctgaagggcaagtacgtgcagatccccaccacctgcgccaacgaccccgtgggcttcaccctgaagaacaccgtgtgcaccgtgtgcggcatgtggaagggctacggctgcagctgcgaccagctgagggagcccatgctgcag

SEQ ID NO: 356 - DNA, 1803 bp, synthetic construct
  source 1..1803: mol_type = other DNA; note = NSP13 from SARS-CoV-2
gccgtgggcgcctgcgtgctgtgcaacagccagaccagcctgaggtgcggcgcctgcatcaggaggcccttcctgtgctgcaagtgctgctacgaccacgtgatcagcaccagccacaagctggtgctgagcgtgaacccctacgtgtgcaacgcccccggctgcgacgtgaccgacgtgacccagctgtacctgggcggcatgagctactactgcaagagccacaagccccccatcagcttccccctgtgcgccaacggccaggtgttcggcctgtacaagaacacctgcgtgggcagcgacaacgtgaccgacttcaacgccatcgccacctgcgactggaccaacgccggcgactacatcctggccaacacctgcaccgagaggctgaagctgttcgccgccgagaccctgaaggccaccgaggagaccttcaagctgagctacggcatcgccaccgtgagggaggtgctgagcgacagggagctgcacctgagctgggaggtgggcaagcccaggccccccctgaacaggaactacgtgttcaccggctacagggtgaccaagaacagcaaggtgcagatcggcgagtacaccttcgagaagggcgactacggcgacgccgtggtgtacaggggcaccaccacctacaagctgaacgtgggcgactacttcgtgctgaccagccacaccgtgatgcccctgagcgcccccaccctggtgccccaggagcactacgtgaggatcaccggcctgtaccccaccctgaacatcagcgacgagttcagcagcaacgtggccaactaccagaaggtgggcatgcagaagtacagcaccctgcagggcccccccggcaccggcaagagccacttcgccatcggcctggccctgtactaccccagcgccaggatcgtgtacaccgcctgcagccacgccgccgtggacgccctgtgcgagaaggccctgaagtacctgcccatcgacaagtgcagcaggatcatccccgccagggccagggtggagtgcttcgacaagttcaaggtgaacagcaccctggagcagtacgtgttctgcaccgtgaacgccctgcccgagaccaccgccgacatcgtggtgttcgacgagatcagcatggccaccaactacgacctgagcgtggtgaacgccaggctgagggccaagcactacgtgtacatcggcgaccccgcccagctgcccgcccccaggaccctgctgaccaagggcaccctggagcccgagtacttcaacagcgtgtgcaggctgatgaagaccatcggccccgacatgttcctgggcacctgcaggaggtgccccgccgagatcgtggacaccgtgagcgccctggtgtacgacaacaagctgaaggcccacaaggacaagagcgcccagtgcttcaagatgttctacaagggcgtgatcacccacgacgtgagcagcgccatcaacaggccccagatcggcgtggtgagggagttcctgaccaggaaccccgcctggaggaaggccgtgttcatcagcccctacaacagccagaacgccgtggccagcaagatcctgggcctgcccacccagaccgtggacagcagccagggcagcgagtacgactacgtgatcttcacccagaccaccgagaccgcccacagctgcaacgtgaacaggttcaacgtggccatcaccagggccaaggtgggcatcctgtgcatcatgagcgacagggacctgtacgacaagctgcagttcaccagcctggagatccccaggaggaacgtggccaccctgcag

SEQ ID NO: 357 - DNA, 1581 bp, synthetic construct
  source 1..1581: mol_type = other DNA; note = NSP14 from SARS-CoV-2
gccgagaacgtgaccggcctgttcaaggactgcagcaaggtgatcaccggcctgcaccccacccaggcccccacccacctgagcgtggacaccaagttcaagaccgagggcctgtgcgtggacatccccggcatccccaaggacatgacctacaggaggctgatcagcatgatgggcttcaagatgaactaccaggtgaacggctaccccaacatgttcatcaccagggaggaggccatcaggcacgtgagggcctggatcggcttcgacgtggagggctgccacgccaccagggaggccgtgggcaccaacctgcccctgcagctgggcttcagcaccggcgtgaacctggtggccgtgcccaccggctacgtggacacccccaacaacaccgacttcagcagggtgagcgccaagcccccccccggcgaccagttcaagcacctgatccccctgatgtacaagggcctgccctggaacgtggtgaggatcaagatcgtgcagatgctgagcgacaccctgaagaacctgagcgacagggtggtgttcgtgctgtgggcccacggcttcgagctgaccagcatgaagtacttcgtgaagatcggccccgagaggacctgctgcctgtgcgacaggagggccacctgcttcagcaccgccagcgacacctacgcctgctggcaccacagcatcggcttcgactacgtgtacaaccccttcatgatcgacgtgcagcagtggggcttcaccggcaacctgcagagcaaccacgacctgtactgccaggtgcacggcaacgcccacgtggccagctgcgacgccatcatgaccaggtgcctggccgtgcacgagtgcttcgtgaagagggtggactggaccatcgagtaccccatcatcggcgacgagctgaagatcaacgccgcctgcaggaaggtgcagcacatggtggtgaaggccgccctgctggccgacaagttccccgtgctgcacgacatcggcaaccccaaggccatcaagtgcgtgccccaggccgacgtggagtggaagttctacgacgcccagccctgcagcgacaaggcctacaagatcgaggagctgttctacagctacgccacccacagcgacaagttcaccgacggcgtgtgcctgttctggaactgcaacgtggacaggtaccccgccaacagcatcgtgtgcaggttcgacaccagggtgctgagcaacctgaacctgcccggctgcgacggcggcagcctgtacgtgaacaagcacgccttccacacccccgccttcgacaagagcgccttcgtgaacctgaagcagctgcccttcttctactacagcgacagcccctgcgagagccacggcaagcaggtggtgagcgacatcgactacgtgcccctgaagagcgccacctgcatcaccaggtgcaacctgggcggcgccgtgtgcaggcaccacgccaacgagtacaggctgtacctggacgcctacaacatgatgatcagcgccggcttcagcctgtgggtgtacaagcagttcgacacctacaacctgtggaacaccttcaccaggctgcag

SEQ ID NO: 358 - DNA, 1038 bp, synthetic construct
  source 1..1038: mol_type = other DNA; note = NSP15 from SARS-CoV-2
agcctggagaacgtggccttcaacgtggtgaacaagggccacttcgacggccagcagggcgaggtgcccgtgagcatcatcaacaacaccgtgtacaccaaggtggacggcgtggacgtggagctgttcgagaacaagaccaccctgcccgtgaacgtggccttcgagctgtgggccaagaggaacatcaagcccgtgcccgaggtgaagatcctgaacaacctgggcgtggacatcgccgccaacaccgtgatctgggactacaagagggacgcccccgcccacatcagcaccatcggcgtgtgcagcatgaccgacatcgccaagaagcccaccgagaccatctgcgcccccctgaccgtgttcttcgacggcagggtggacggccaggtggacctgttcaggaacgccaggaacggcgtgctgatcaccgagggcagcgtgaagggcctgcagcccagcgtgggccccaagcaggccagcctgaacggcgtgaccctgatcggcgaggccgtgaagacccagttcaactactacaagaaggtggacggcgtggtgcagcagctgcccgagacctacttcacccagagcaggaacctgcaggagttcaagcccaggagccagatggagatcgacttcctggagctggccatggacgagttcatcgagaggtacaagctggagggctacgccttcgagcacatcgtgtacggcgacttcagccacagccagctgggcggcctgcacctgctgatcggcctggccaagaggttcaaggagagccccttcgagctggaggacttcatccccatggacagcaccgtgaagaactacttcatcaccgacgcccagaccggcagcagcaagtgcgtgtgcagcgtgatcgacctgctgctggacgacttcgtggagatcatcaagagccaggacctgagcgtggtgagcaaggtggtgaaggtgaccatcgactacaccgagatcagcttcatgctgtggtgcaaggacggccacgtggagaccttctaccccaagctgcag

SEQ ID NO: 359 - DNA, 894 bp, synthetic construct
  source 1..894: mol_type = other DNA; note = NSP16 from SARS-CoV-2
agcagccaggcctggcagcccggcgtggccatgcccaacctgtacaagatgcagaggatgctgctggagaagtgcgacctgcagaactacggcgacagcgccaccctgcccaagggcatcatgatgaacgtggccaagtacacccagctgtgccagtacctgaacaccctgaccctggccgtgccctacaacatgagggtgatccacttcggcgccggcagcgacaagggcgtggcccccggcaccgccgtgctgaggcagtggctgcccaccggcaccctgctggtggacagcgacctgaacgacttcgtgagcgacgccgacagcaccctgatcggcgactgcgccaccgtgcacaccgccaacaagtgggacctgatcatcagcgacatgtacgaccccaagaccaagaacgtgaccaaggagaacgacagcaaggagggcttcttcacctacatctgcggcttcatccagcagaagctggccctgggcggcagcgtggccatcaagatcaccgagcacagctggaacgccgacctgtacaagctgatgggccacttcgcctggtggaccgccttcgtgaccaacgtgaacgccagcagcagcgaggccttcctgatcggctgcaactacctgggcaagcccagggagcagatcgacggctacgtgatgcacgccaactacatcttctggaggaacaccaaccccatccagctgagcagctacagcctgttcgacatgagcaagttccccctgaagctgaggggcaccgccgtgatgagcctgaaggagggccagatcaacgacatgatcctgagcctgctgagcaagggcaggctgatcatcagggagaacaacagggtggtgatcagcagcgacgtgctggtgaacaac

SEQ ID NO: 360 - DNA, 1923 bp, synthetic construct
  source 1..1923: mol_type = other DNA; note = NSP2
atggcatacactcgctatgtcgataacaacttctgtggccctgatggctaccctcttgagtgcattaaagaccttctagcacgtgctggtaaagcttcatgcactttgtccgaacaactggactttattgacactaagaggggtgtatactgctgccgtgaacatgagcatgaaattgcttggtacacggaacgttctgaaaagagctatgaattgcagacaccttttgaaattaaattggcaaagaaatttgacaccttcaatggggaatgtccaaattttgtatttcccttaaattccataatcaagactattcaaccaagggttgaaaagaaaaagcttgatggctttatgggtagaattcgatctgtctatccagttgcgtcaccaaatgaatgcaaccaaatgtgcctttcaactctcatgaagtgtgatcattgtggtgaaacttcatggcagacgggcgattttgttaaagccacttgcgaattttgtggcactgagaatttgactaaagaaggtgccactacttgtggttacttaccccaaaatgctgttgttaaaatttattgtccagcatgtcacaattcagaagtaggacctgagcatagtcttgccgaataccataatgaatctggcttgaaaaccattcttcgtaagggtggtcgcactattgcctttggaggctgtgtgttctcttatgttggttgccataacaagtgtgcctattgggttccacgtgctagcgctaacataggttgtaaccatacaggtgttgttggagaaggttccgaaggtcttaatgacaaccttcttgaaatactccaaaaagagaaagtcaacatcaatattgttggtgactttaaacttaatgaagagatcgccattattttggcatctttttctgcttccacaagtgcttttgtggaaactgtgaaaggtttggattataaagcattcaaacaaattgttgaatcctgtggtaattttaaagttacaaaaggaaaagctaaaaaaggtgcctggaatattggtgaacagaaatcaatactgagtcctctttatgcatttgcatcagaggctgctcgtgttgtacgatcaattttctcccgcactcttgaaactgctcaaaattctgtgcgtgttttacagaaggccgctataacaatactagatggaatttcacagtattcactgagactcattgatgctatgatgttcacatctgatttggctactaacaatctagttgtaatggcctacattacaggtggtgttgttcagttgacttcgcagtggctaactaacatctttggcactgtttatgaaaaactcaaacccgtccttgattggcttgaagagaagtttaaggaaggtgtagagtttcttagagacggttgggaaattgttaaatttatctcaacctgtgcttgtgaaattgtcggtggacaaattgtcacctgtgcaaaggaaattaaggagagtgttcagacattctttaagcttgtaaataaatttttggctttgtgtgctgactctatcattattggtggagctaaacttaaagccttgaatttaggtgaaacatttgtcacgcactcaaagggattgtacagaaagtgtgttaaatccagagaagaaactggcctactcatgcctctaaaagccccaaaagaaattatcttcttagagggagaaacacttcccacagaagtgttaacagaggaagttgtcttgaaaactggtgatttacaaccattagaacaacctactagtgaagctgttgaagctccattggttggtacaccagtttgtattaacgggcttatgttgctcgaaatcaaagacacagaaaagtactgtgcccttgcacctaatatgatggtaacaaacaataccttcacactcaaaggcggttgatga

SEQ ID NO: 361 - DNA, 1923 bp, synthetic construct
  source 1..1923: mol_type = other DNA; note = Nsp2 Codon optimized
atggcctataccaggtacgtggataataatttctgtgggcctgacggctaccctctggaatgcatcaaagacctgttggctagggcaggaaaagcttcatgcaccctgtctgagcaacttgacttcattgacacaaagcggggagtctactgctgccgcgaacatgagcacgagattgcttggtacacagagcgaagcgaaaaatcttatgaactgcagacaccctttgaaatcaagttagcaaagaagttcgacacctttaatggcgagtgcccaaactttgtgttccctctgaattcgatcattaaaaccatccagcctagagtagaaaaaaaaaagctcgatggtttcatgggccgcataagatctgtgtatcctgtggctagccccaacgagtgtaaccagatgtgtttgtcaaccctgatgaaatgtgatcactgtggagaaacgagttggcagactggagactttgttaaagctacttgcgaattctgcgggacagagaacctcaccaaggagggagcaaccacgtgcggttacctgccccaaaatgctgtagtcaaaatctactgtccggcatgccataactcagaggttgggccagagcatagcttggcagagtaccataatgaatcgggacttaaaacaatcctgcggaagggtggccgtacgattgcctttggagggtgcgttttcagctatgtgggctgccacaacaagtgcgcctactgggtgcccagagccagtgccaacattggatgtaaccacacaggcgtcgttggggagggcagtgagggcttgaatgacaatcttctggagattctacaaaaggaaaaggtcaacatcaacatagttggggatttcaagctgaacgaggagattgccatcattttagcgtccttttctgcctcaacaagtgccttcgtggaaactgtgaaagggcttgactacaaggcatttaagcagatcgtggagtcctgtggcaactttaaagtgactaagggcaaggccaaaaagggggcctggaatataggcgaacagaagtccatcctgagccctctctatgcttttgctagtgaagctgcccgcgttgtccggtctatcttcagccgaactttggagactgctcagaactctgtcagagtcctgcagaaggcagccattaccatacttgatgggatatctcaatacagcctccgtctgattgatgccatgatgtttacttcagatctcgcaaccaacaatctcgttgtgatggcttatatcactgggggtgtggtacagctgacgtcccagtggctgactaatatattcgggaccgtatatgagaagctcaagccagtgctggactggctggaagagaaattcaaggaaggtgtggaatttttgagggacggctgggagattgtgaagtttattagcacctgtgcatgtgagattgttggcggacagatcgtgacatgtgctaaggaaataaaagagagtgtacaaacgttcttcaaactcgtgaataaatttttagcgctatgtgctgactccatcataattggcggagccaagttaaaagcgctcaacttgggagagacatttgtcacccactccaaaggtctgtataggaagtgtgtaaagtccagagaggagactggactactaatgccactgaaggctcccaaagagatcatcttcttagaaggagagacacttccgactgaggtccttacagaagaagtggtcctcaaaactggtgatctccagcccctagagcagcccacatccgaggcagtcgaagccccactggtgggcacacctgtgtgcatcaatggactcatgttactcgaaatcaaggataccgagaagtactgcgcactggcccctaacatgatggtaaccaataacacattcaccctgaaaggtggttgataa

SEQ ID NO: 362 - DNA, 4493 bp, synthetic construct
  source 1..4493: mol_type = other DNA; note = Nsp3
atgctcttgttagtgacattgacatcactttcttaaagaaagatgctccatatatagtgggtgatgttgttcaagagggtgttttaactgctgtggttatacctactaaaaaggctagtggcactactgaaatgctagcgaaagctttgagaaaagtgccaacagacaattatataaccacttacccgggtcagggtttaaatggttacactgtagaggaggcaaagacagtgcttaaaaagtgtaaaagtgctttttacattctaccatctattatctctaatgagaagcaagaaattcttggaactgtttcttggaatttgcgagaaatgcttgcacatgcagaagaaacacgcaaattaatgcctgtctgtgtggaaactaaagccatagtttcaactatacagcgtaaatataagggtattaaaatacaagagggtgtggttgattatggtgctagattttacttttacaccagtaaaacaactgtagcgtcacttatcaacacacttaacgatctaaatgaaactcttgttacaatgccacttggctatgtaacacatggcttaaatttggaagaagctgctcggtatatgagatctctcaaagtgccagctacagtttctgtttcttcacctgatgctgttacagcgtataatggttatcttacttcttcttctaaaacacctgaagaacattttattgaaaccatctcacttgctggttcctataaagattggtcctattctggacaatctacacaactaggtatagaatttcttaagagaggtgataaaagtgtatattacactagtaatcctaccacattccacctagatggtgaagttatcacctttgacaatcttaagacacttctttctttgagagaagtgaggactattaaggtgtttacaacagtagacaacattaacctccacacgcaagttgtggacatgtcaatgacatatggacaacagtttggtccaacttatttggatggagctgatgttactaaaataaaacctcataattcacatgaaggtaaaacattttatgttttacctaatgatgacactctacgtgttgaggcttttgagtactaccacacaactgatcctagttttctgggtaggtacatgtcagcattaaatcacactaaaaagtggaaatacccacaagttaatggtttaacttctattaaatgggcagataacaactgttatcttgccactgcattgttaacactccaacaaatagagttgaagtttaatccacctgctctacaagatgcttattacagagcaagggctggtgaagctgctaacttttgtgcacttatcttagcctactgtaataagacagtaggtgagttaggtgatgttagagaaacaatgagttacttgtttcaacatgccaatttagattcttgcaaaagagtcttgaacgtggtgtgtaaaacttgtggacaacagcagacaacccttaagggtgtagaagctgttatgtacatgggcacactttcttatgaacaatttaagaaaggtgttcagataccttgtacgtgtggtaaacaagctacaaaatatctagtacaacaggagtcaccttttgttatgatgtcagcaccacctgctcagtatgaacttaagcatggtacatttacttgtgctagtgagtacactggtaattaccagtgtggtcactataaacatataacttctaaagaaactttgtattgcatagacggtgctttacttacaaagtcctcagaatacaaaggtcctattacggatgttttctacaaagaaaacagttacacaacaaccataaaaccagttacttataaattggatggtgttgtttgtacagaaattgaccctaagttggacaattattataagaaagacaattcttatttcacagagcaaccaattgatcttgtaccaaaccaaccatatccaaacgcaagcttcgataattttaagtttgtatgtgataatatcaaatttgctgatgatttaaaccagttaactggttataagaaacctgcttcaagagagcttaaagttacatttttccctgacttaaatggtgatgtggtggctattgattataaacactacacaccctcttttaagaaaggagctaaattgttacataaacctattgtttggcatgttaacaatgcaactaataaagccacgtataaaccaaatacctggtgtatacgttgtctttggagcacaaaaccagttgaaacatcaaattcgtttgatgtactgaagtcagaggacgcgcagggaatggataatcttgcctgcgaagatctaaaaccagtctctgaagaagtagtggaaaatcctaccatacagaaagacgttcttgagtgtaatgtgaaaactaccgaagttgtaggagacattatacttaaaccagcaaataatagtttaaaaattacagaagaggttggccacacagatctaatggctgcttatgtagacaattctagtcttactattaagaaacctaatgaattatctagagtattaggtttgaaaacccttgctactcatggtttagctgctgttaatagtgtcccttgggatactatagctaattatgctaagccttttcttaacaaagttgttagtacaactactaacatagttacacggtgtttaaaccgtgtttgtactaattatatgccttatttctttactttattgctacaattgtgtacttttactagaagtacaaattctagaattaaagcatctatgccgactactatagcaaagaatactgttaagagtgtcggtaaattttgtctagaggcttcatttaattatttgaagtcacctaatttttctaaactgataaatattataatttggtttttactattaagtgtttgcctaggttctttaatctactcaaccgctgctttaggtgttttaatgtctaatttaggcatgccttcttactgtactggttacagagaaggctatttgaactctactaatgtcactattgcaacctactgtactggttctataccttgtagtgtttgtcttagtggtttagattctttagacacctatccttctttagaaactatacaaattaccatttcatcttttaaatgggatttaactgcttttggcttagttgcagagtggtttttggcatatattcttttcactaggtttttctatgtacttggattggctgcaatcatgcaattgtttttcagctattttgcagtacattttattagtaattcttggcttatgtggttaataattaatcttgtacaaatggccccgatttcagctatggttagaatgtacatcttctttgcatcattttattatgtatggaaaagttatgtgcatgttgtagacggttgtaattcatcaacttgtatgatgtgttacaaacgtaatagagcaacaagagtcgaatgtacaactattgttaatggtgttagaaggtccttttatgtctatgctaatggaggtaaaggcttttgcaaactacacaattggaattgtgttaattgtgatacattctgtgctggtagtacatttattagtgatgaagttgcgagagacttgtcactacagtttaaaagaccaataaatcctactgaccagtcttcttacatcgttgatagtgttacagtgaagaatggttccatccatctttactttgataaagctggtcaaaagacttatgaaagacattctctctctcattttgttaacttagacaacctgagagctaataacactaaaggttcattgcctattaatgttatagtttttgatggtaaatcaaaatgtgaagaatcatctgcaaaatcagcgtctgtttactacagtcagcttatgtgtcaacctatactgttactagatcaggcattagtgtctgatgttggtgatagtgcggaagttgcagttaaaatgtttgatgcttacgttaatacgttttcatcaacttttaacgtaccaatggaaaaactcaaaacactagttgcaactgcagaagctgaacttgcaaagaatgtgtccttagacaatgtcttatctacttttatttcagcagctcggcaagggtttgttgattcagatgtagaaactaaagatgttgttgaatgtcttaaattgtcacatcaatctgacatagaagttactggcgatagttgtaataactatatgctcacctataacaaagttgaaaacatgacaccccgtgaccttggtgcttgtattgactgtagtgcgcgtcatattaatgcgcaggtagcaaaaagtcacaacattgctttgatatggaacgttaaagatttcatgtcattgtctgaacaactacgaaaacaaatacgtagtgctgctaaaaagaataacttaccttttaagttgacatgtgcaactactagacaagttgttaatgttgtaacaacaaagatagcacttaagggtggttgatga

SEQ ID NO: 363 - DNA, 4491 bp, synthetic construct
  source 1..4491: mol_type = other DNA; note = Nsp3 codon optimized
atgctcttacttgttattgacatcacctttctaaagaaagatgccccttatattgtgggagacgttgtccaggagggagtccttacggccgtggtgattccaacaaagaaggctagtggcaccacagaaatgctggccaaggccttgcgcaaggtgccgacagacaactacatcactacatatcctggacaaggcctgaacggatatacagtggaagaggcaaagactgtgctaaagaagtgcaagtctgccttttacatccttccaagcattattagcaacgagaagcaggaaatactcggaaccgtaagctggaaccttagagagatgcttgcgcatgctgaggaaacccgaaaactgatgcctgtgtgtgttgaaaccaaagccatcgtttctaccatccagcgaaagtataagggtatcaagatccaagagggagtggtagactatggcgctagattctacttctatacctctaaaacaactgtcgcctctcttatcaatactctgaatgacctgaatgagactcttgtgaccatgcccctgggatacgtaacccatgggcttaacttggaagaagccgctcgctacatgcgtagcctgaaggtccctgctactgttagtgtctcttcccccgatgccgtcacagcttacaacgggtatctgacgtcaagctccaaaactcctgaagagcacttcatcgagaccattagtctagcaggatcctataaagactggagttactcaggccagagcacccagctggggatagagttcttgaaacgtggagacaagtccgtctactacacatcaaatcccacgacgttccacctggatggggaagtgataacctttgataacttaaaaaccctgctgagcctgagggaagtccggactatcaaggtttttactacagtggataatattaaccttcacacacaggtggtggacatgtccatgacctatgggcagcagttcggtcctacctacctggacggagctgacgttaccaaaatcaaaccccacaactctcatgagggaaagacgttctacgtgctgcccaatgatgacaccttgcgagtggaggcatttgagtattaccacactaccgatccgtctttcttaggccgctatatgtccgctttaaatcatacaaagaagtggaagtaccctcaggtaaacggcctgacatctattaaatgggccgacaacaactgctatctggcaactgctttgctcacacttcagcagattgagttgaaatttaaccctcccgcactgcaggacgcttattatcgggcaagggccggtgaggcggctaacttctgtgctctcatccttgcttactgtaacaaaacagtgggcgagctaggagatgtcagggagacaatgtcttacttgtttcagcacgccaacttagactcctgcaaaagagtgctcaatgtagtctgcaaaacctgcggtcagcagcagactaccttgaagggggtcgaagcagtgatgtacatgggtacactatcctatgagcaatttaaaaagggtgttcagatcccctgcacatgtggcaagcaggcaacaaaatacctcgtgcagcaagaatccccatttgttatgatgagcgcacctccagcccagtacgaactgaaacatggaacatttacctgcgcttcggagtacactggcaattaccagtgtgggcattacaagcacatcacgtccaaagaaacactctactgcatagatggagccctgttgaccaagtccagcgaatataaaggccctatcacagatgttttctacaaggagaattcatatacaaccaccatcaagcccgtgacatacaagttagacggcgtggtatgtacagaaattgaccccaagctggacaattactacaaaaaagacaatagctattttactgaacaaccaatcgatcttgtccctaatcagccctaccccaatgcgtcatttgataactttaagtttgtgtgtgataatattaaatttgcagatgatctaaaccagttgacgggatacaagaaacccgcctcgcgcgaactgaaagtgactttttttccagatctgaatggggatgtcgtggccatagattataagcattatactccaagtttcaagaaaggcgctaagttattacataagcctattgtctggcatgtcaacaatgctacaaataaagccacttataagccaaacacatggtgtattaggtgcctgtggagcacaaaaccagtggagactagcaattcctttgacgtcctgaagagtgaagatgcacaaggcatggataacttggcctgtgaggacctgaaaccagtctcagaggaagtggtggaaaatccaaccatccagaaagacgtactggagtgtaacgtgaaaaccactgaggttgtgggggacattatcttaaaacctgctaacaacagcctgaagattaccgaggaggtaggacacactgatttaatggcagcttacgtagataactccagtctgaccatcaagaagcctaacgagctgagtcgggtgctaggcctcaaaactctggccacccacggcctagcggccgttaattctgtaccgtgggatacaatcgctaattatgccaagcccttcctcaacaaggttgtcagcacgaccaccaacatcgtgacccgatgcttgaaccgtgtgtgcacgaactatatgccctatttctttacccttctactccagctgtgtactttcacccggtctacaaacagtcggatcaaggccagcatgccaaccacaattgccaagaacaccgttaaatccgttgggaagttctgccttgaggctagcttcaactacctgaaatcaccaaacttctcgaagctgattaacattataatatggttcctgctcctgtccgtgtgtcttggaagccttatctactccacagctgccctgggcgtcctcatgtctaatctgggtatgcctagttactgcacaggctaccgggaaggttatttgaatagcactaacgttacaatcgccacatactgcacagggagcattccttgctccgtttgtttgtcaggtttggattctctcgatacttatccctctctggaaactattcagatcacgatttctagtttcaaatgggacctcacggcatttgggctcgtggccgagtggttcctggcctatatactcttcactaggttcttctatgtcctggggctggctgccatcatgcagctctttttcagttatttcgcagtccattttatcagcaatagctggctcatgtggctcataataaatttagtacagatggcaccaatctcggccatggtgaggatgtatatctttttcgcatccttttactatgtgtggaaatcatatgtccacgtggtggacggatgcaatagtagcacgtgcatgatgtgctacaaacggaatagagcgacccgcgtggaatgtaccaccattgtgaatggggttcgcagatcattctacgtatatgccaacggcggcaagggcttctgcaagctccataactggaactgtgtcaattgtgacacattttgtgcaggatcaactttcatcagtgacgaggtcgcgcgggacctcagtctgcaattcaagagaccgatcaaccctaccgaccagtcatcttacatcgtggattcagttaccgtcaagaatggatccattcacttatacttcgataaagcaggccaaaagacttacgagaggcactctctcagccactttgtgaacctggacaatctgagggcaaataacaccaaggggtctcttcccattaatgtgatagtgtttgacgggaagagcaagtgtgaggagagcagcgccaaatctgcctcagtgtactacagccagctcatgtgtcaaccaatactccttctagaccaagccctggtctcagacgttggggacagtgctgaagtggctgtgaagatgttcgatgcttatgtgaacacattttcttccactttcaacgtccctatggagaaactaaagacgctggtggcaacggccgaggccgagctggccaagaacgtttcattggacaatgtgctctcgacattcatctccgctgcaagacagggctttgtggactcagatgtagaaaccaaggatgtggtcgagtgcttgaagttgtcgcaccagagcgacatcgaagtcacaggtgacagctgcaataattacatgctgacctataacaaggtagagaacatgacaccacgcgatttgggagcctgcatagactgtagtgctaggcacattaatgcacaggtcgcaaaatctcataacatcgcgctaatctggaatgtcaaagatttcatgagcctgtctgagcaattgagaaagcaaatcaggagtgcagctaaaaaaaataacctcccgttcaagctaacatgtgccacaactagacaggtggtgaacgtggtaactactaaaattgcgctgaagggtggttgataa

SEQ ID NO: 364 - DNA, 1509 bp, synthetic construct
  source 1..1509: mol_type = other DNA; note = Nsp4
atgaaaattgttaataattggttgaagcagttaattaaagttacacttgtgttcctttttgttgctgctattttctatttaataacacctgttcatgtcatgtctaaacatactgacttttcaagtgaaatcataggatacaaggctattgatggtggtgtcactcgtgacatagcatctacagatacttgttttgctaacaaacatgctgattttgacacatggtttagccagcgtggtggtagttatactaatgacaaagcttgcccattgattgctgcagtcataacaagagaagtgggttttgtcgtgcctggtttgcctggcacgatattacgcacaactaatggtgactttttgcatttcttacctagagtttttagtgcagttggtaacatctgttacacaccatcaaaacttatagagtacactgactttgcaacatcagcttgtgttttggctgctgaatgtacaatttttaaagatgcttctggtaagccagtaccatattgttatgataccaatgtactagaaggttctgttgcttatgaaagtttacgccctgacacacgttatgtgctcatggatggctctattattcaatttcctaacacctaccttgaaggttctgttagagtggtaacaacttttgattctgagtactgtaggcacggcacttgtgaaagatcagaagctggtgtttgtgtatctactagtggtagatgggtacttaacaatgattattacagatctttaccaggagttttctgtggtgtagatgctgtaaatttatttactaatatgtttacaccactaattcaacctattggtgctttggacatatcagcatctatagtagctggtggtattgtggctatcgtagtaacatgccttgcctactattttatgaggtttagaagagcttttggtgaatacagtcatgtagttgcctttaatactttactattccttatgtcattcattgtactctgtttaacaccagtttactcattcttacctggtgtttattctgttatttacttgtacttgacattttatcttactaatgatgtttcttttttagcacatattcagtggatggttatgttcacacctttagtacctttctggataacaattgcttatatcatttgtatttccacaaagcatttctattggttctttagtaattacctaaagagacgtgtagtctttaatggtgtttcctttagtacttttgaagaagctgcgctgtgcacctttttgttaaataaagaaatgtatctaaagttgcgtagtgatgtgctattaccttttacgcaatataatagatacttagctctttataataagtacaagtattttagtggagcaatggatacaactagctacagagaagctgcttgttgtcatctcgcaaaggctctcaatgacttcagtaactcaggttctgatgttctttaccaaccaccacaaatctctatcacctcagctgttttgcagtgatga

SEQ ID NO: 365 - DNA, 1509 bp, synthetic construct
  source 1..1509: mol_type = other DNA; note = Nsp4 codon optimized
atgaaaatcgtcaacaactggctgaaacagctgatcaaagtcaccttagtgttcctgttcgtggcagccattttctatctgatcacccctgtgcatgtcatgtcaaagcatacagatttttctagtgaaattatcggttataaagctatcgacgggggggtgactagggacatagcgtcgactgatacttgctttgcaaacaagcacgcagattttgatacctggttttctcaacgcggaggctcctacacaaatgacaaggcctgcccactcatcgccgctgttattaccagagaggtaggcttcgttgttcctgggctcccaggaaccattctgcggacgactaacggagattttctccactttctgcctagagtgttttcagctgtaggaaacatatgttacacaccctcgaagctgattgagtacaccgacttcgcaacttcagcatgtgttctcgctgcagagtgcaccatcttcaaggacgcctccgggaagccggtcccttactgctatgacaccaatgtgttggaaggttccgtggcctatgagtcactccgtcctgacactcggtatgtgttgatggatggcagcatcattcagtttcccaacacatatctcgaggggagtgtgagggtcgtgaccacatttgacagtgaatattgcaggcacggaacctgtgaacgatccgaggccggagtatgcgtaagcacatcagggaggtgggtactcaataatgattattaccgttctttgccaggggtgttctgtggtgtggatgcggtcaatctctttacaaacatgtttactccgttaattcagccaataggcgctctggacatatctgcttctatagtagctggcggcattgttgccattgttgtgacatgcctcgcatactacttcatgaggttccggcgagccttcggtgagtattctcatgtggtggcgttcaatacactgctgttcctgatgagcttcattgtgctgtgtctgacaccagtgtattcctttttgcctggtgtctattctgtgatatacctgtatttgaccttctaccttaccaatgatgtgtcgttcctagcgcacatccagtggatggtgatgttcactcccttagtccccttctggatcacaatcgcctacatcatctgcatcagcaccaaacatttttactggttcttctcaaactacctgaagcgccgcgtggtctttaatggagtctccttcagcacttttgaagaggctgccctatgtacgtttcttctcaacaaggagatgtacctgaaactaagatctgatgttctgctcccattcacgcagtacaacagatatcttgcactttacaacaaatacaagtactttagtggcgccatggacacaacgtcctaccgggaagctgcttgttgtcacctggccaaggccctgaatgactttagcaacagcggcagtgacgtattgtatcagcccccccagatctccattactagcgcagtgttacaatgataa

SEQ ID NO: 366 - DNA, 3387 bp, synthetic construct
  source 1..3387: mol_type = other DNA; note = Nsp5, Nsp6, Nsp7, Nsp8, Nsp9, Nsp10
atgagtggttttagaaaaatggcattcccatctggtaaagttgagggttgtatggtacaagtaacttgtggtacaactacacttaacggtctttggcttgatgacgtagtttactgtccaagacatgtgatctgcacctctgaagatatgcttaaccctaattatgaagatttactcattcgtaagtctaatcataatttcttggtacaggctggtaatgttcaactcagggttattggacattctatgcaaaattgtgtacttaagcttaaggttgatacagccaatcctaagacacctaagtataagtttgttcgcattcaaccaggacagactttttcagtgttagcttgttacaatggttcaccatctggtgtttaccaatgtgctatgagacacaatttcactattaagggttcattccttaatggttcatgtggtagtgttggttttaacatagattatgactgtgtctctttttgttacatgcaccatatggaattaccaactggagttcatgctggcacagacttagaaggtaacttttatggaccttttgttgacaggcaaacagcacaagcagctggtacggacacaactattacagttaatgttttagcttggttgtacgctgctgttataaatggagacaggtggtttctcaatcgatttaccacaactcttaatgactttaaccttgtggctatgaagtacaattatgaacctctaacacaagaccatgttgacatactaggacctctttctgctcaaactggaattgccgttttagatatgtgtgcttcattaaaagaattactgcaaaatggtatgaatggacgtaccatattgggtagtgctttattagaagatgaatttacaccttttgatgttgttagacaatgctcaggtgttactttccaaagtgcagtgaaaagaacaatcaagggtacacaccactggttgttactcacaattttgacttcacttttagttttagtccagagtactcaatggtctttgttcttttttttgtatgaaaatgcctttttaccttttgctatgggtattattgctatgtctgcttttgcaatgatgtttgtcaaacataagcatgcatttctctgtttgtttttgttaccttctcttgccactgtagcttattttaatatggtctatatgcctgctagttgggtgatgcgtattatgacatggttggatatggttgatactagtttgaagctaaaagactgtgttatgtatgcatcagctgtagtgttactaatccttatgacagcaagaactgtgtatgatgatggtgctaggagagtgtggacacttatgaatgtcttgacactcgtttataaagtttattatggtaatgctttagatcaagccatttccatgtgggctcttataatctctgttacttctaactactcaggtgtagttacaactgtcatgtttttggccagaggtattgtttttatgtgtgttgagtattgccctattttcttcataactggtaatacacttcagtgtataatgctagtttattgtttcttaggctatttttgtacttgttactttggcctcttttgtttactcaaccgctactttagactgactcttggtgtttatgattacttagtttctacacaggagtttagatatatgaattcacagggactactcccacccaagaatagcatagatgccttcaaactcaacattaaattgttgggtgttggtggcaaaccttgtatcaaagtagccactgtacagtctaaaatgtcagatgtaaagtgcacatcagtagtcttactctcagttttgcaacaactcagagtagaatcatcatctaaattgtgggctcaatgtgtccagttacacaatgacattctcttagctaaagatactactgaagcctttgaaaaaatggtttcactactttctgttttgctttccatgcagggtgctgtagacataaacaagctttgtgaagaaatgctggacaacagggcaaccttacaagctatagcctcagagtttagttcccttccatcatatgcagcttttgctactgctcaagaagcttatgagcaggctgttgctaatggtgattctgaagttgttcttaaaaagttgaagaagtctttgaatgtggctaaatctgaatttgaccgtgatgcagccatgcaacgtaagttggaaaagatggctgatcaagctatgacccaaatgtataaacaggctagatctgaggacaagagggcaaaagttactagtgctatgcagacaatgcttttcactatgcttagaaagttggataatgatgcactcaacaacattatcaacaatgcaagagatggttgtgttcccttgaacataatacctcttacaacagcagccaaactaatggttgtcataccagactataacacatataaaaatacgtgtgatggtacaacatttacttatgcatcagcattgtgggaaatccaacaggttgtagatgcagatagtaaaattgttcaacttagtgaaattagtatggacaattcacctaatttagcatggcctcttattgtaacagctttaagggccaattctgctgtcaaattacagaataatgagcttagtcctgttgcactacgacagatgtcttgtgctgccggtactacacaaactgcttgcactgatgacaatgcgttagcttactacaacacaacaaagggaggtaggtttgtacttgcactgttatccgatttacaggatttgaaatgggctagattccctaagagtgatggaactggtactatttatacagaactggaaccaccttgtaggtttgttacagacacacctaaaggtcctaaagtgaagtatttatactttattaaaggattaaacaacctaaatagaggtatggtacttggtagtttagctgccacagtacgtctacaagctggtaatgcaacagaagtgcctgccaattcaactgtattatctttctgtgcttttgctgtagatgctgctaaagcttacaaagattatctagctagtgggggacaaccaatcactaattgtgttaagatgttgtgtacacacactggtactggtcaggcaataacagttacaccggaagccaatatggatcaagaatcctttggtggtgcatcgtgttgtctgtactgccgttgccacatagatcatccaaatcctaaaggattttgtgacttaaaaggtaagtatgtacaaatacctacaacttgtgctaatgaccctgtgggttttacacttaaaaacacagtctgtaccgtctgcggtatgtggaaaggttatggctgtagttgtgatcaactccgcgaacccatgcttcagtgatga

SEQ ID NO: 367 - DNA, 3387 bp, synthetic construct
  source 1..3387: mol_type = other DNA; note = Nsp5, Nsp6, Nsp7, Nsp8, Nsp9, Nsp10 codon optimized
atgagtggcttccggaagatggcttttccatcaggcaaagtggaaggctgcatggtccaggtgacctgtggaaccactacattgaacggcctctggctggatgacgtcgtatactgtcctagacacgtgatctgcacgtcagaggacatgctcaatcctaattatgaagatctactcatacggaagtcgaaccataatttcttggtgcaagcagggaatgtgcagctgcgcgtcatcggccacagcatgcaaaactgtgtactgaagttgaaggtggacactgccaatcctaaaacccccaagtataagttcgtgaggatccagccaggacaaactttcagtgtactggcgtgctacaatggctccccttctggcgtctatcagtgtgctatgcgccataattttacgattaagggttccttcctaaacggatcatgcggcagtgtgggctttaatatagactacgactgcgtgagtttctgctatatgcatcacatggagctaccaacaggggtccatgctggaactgacctggagggcaatttctatgggccttttgtggatcgtcagacagcacaagccgccggcaccgacaccaccattacggtaaatgtgttagcctggctttatgctgctgtaatcaatggagaccgttggttcctgaaccgctttacgacaaccctcaatgacttcaatctagtagccatgaagtacaactatgagcccttaacacaggaccacgtggatattctgggcccgcttagcgcccagaccggcatcgcggttctggatatgtgtgcatcactgaaagagcttctgcagaacggaatgaatggaaggaccatattgggttctgcgttgcttgaagatgagttcaccccgtttgatgttgtgcgccagtgtagcggggtcacctttcagtctgctgtgaagcggactataaagggaacacatcactggttactgctgacgatactgacgtctctgctggtactggtacagagtacccagtggtctttgttcttttttctctacgaaaacgcgttcctgccctttgcgatgggcattattgctatgtccgcgttcgccatgatgtttgtgaagcacaaacatgccttcctctgcttgtttttgctcccttctctagcaactgtggcctatttcaacatggtttacatgccagcaagctgggtgatgaggattatgacctggcttgacatggttgacacatctctgaagcttaaggactgtgtcatgtacgccagcgctgtagttctgctgattctcatgacagctcgcaccgtctacgatgatggggccagacgagtgtggacattaatgaacgtgttaactttggtttacaaggtttactatggaaatgcccttgatcaggcaatcagcatgtgggcattaatcatctcagtcactagcaactacagtggggtcgttaccacagtgatgttcctagctcgaggaatcgtgttcatgtgcgtggagtactgtcccatcttcttcatcactggtaacacattgcagtgcatcatgctggtatattgcttcctgggctacttctgtacatgttactttggactattttgcctgctgaaccgctacttccggctgacgttgggagtgtacgactacctcgtctcgacccaggagttcaggtacatgaatagtcagggcctcctgccgcccaagaactccattgacgctttcaagctgaacatcaaacttcttggggtgggtggcaagccctgtattaaggtggccactgtgcaatccaagatgtctgacgtcaagtgtaccagcgtcgtgttactgtcagtgctacagcagttacgagtggaaagttctagcaagctttgggctcaatgcgtccagctgcacaatgacattcttctagccaaagacaccactgaagcttttgagaaaatggtctcgttgctctccgtgctgttgtccatgcagggggctgtggacatcaacaagctatgtgaagagatgctggacaacagagctaccctccaagccattgcctcagaattttcctccctaccctcttacgctgcatttgctacagcgcaggaagcctacgagcaggcagtggcaaacggtgatagtgaagtagttctgaaaaagctgaagaagtccctgaatgtcgcaaaatccgagtttgacagagatgccgctatgcagcggaaactggagaagatggctgaccaggcaatgactcagatgtataagcaggcaaggtcagaggacaaaagggctaaggtcacatcggctatgcagacgatgctgtttaccatgctcagaaaactcgacaatgacgcgctcaacaatattatcaataacgcccgcgatggctgtgttccactaaacatcatcccccttaccactgctgctaaactcatggttgtgattccagattacaacacctataaaaatacttgcgatggtaccacatttacatatgccagtgccctctgggagattcagcaagtggtggatgccgacagcaaaattgtgcagctttctgaaatctctatggataacagccccaacctagcttggccactgatcgtgactgcactccgggccaattccgcagtcaagttgcagaataatgagctgtcccctgttgcccttcgacagatgagctgcgcagcaggaacaacacagacagcctgtacagatgataatgctttggcctattacaacacaaccaagggtggaagatttgtcctggccctgctttcagacctgcaagaccttaagtgggccagattccctaagtctgacgggactggtactatctataccgaattggagcctccatgcaggttcgtcactgatactcccaaagggccgaaggtgaaatatttatattttatcaagggattaaataacctgaaccggggcatggtgctggggagcttggcagccacggtaaggctacaagctggaaacgccacagaggttccagcgaacagtacagttctgagcttctgtgcgttcgccgtagatgcagcaaaagcatacaaagattacctggccagcggaggacagcctatcacaaactgcgtcaaaatgctgtgcacccacacgggaactggacaggccataactgttaccccagaggctaacatggaccaggagtcttttgggggtgcttcctgctgtctgtactgccgttgccacattgatcatccaaaccctaaagggttttgtgatcttaagggtaaatatgtgcagatacctacaacatgcgccaacgatcccgtggggttcactctgaaaaataccgtgtgtaccgtctgtggcatgtggaaaggctatggttgcagctgcgatcaactcagagaacccatgcttcaatgataa

SEQ ID NO: 368 - DNA, 2802 bp, synthetic construct
  source 1..2802: mol_type = other DNA; note = Nsp12
atgtcagcttgcacaatcgtttttaaacgggtttgcggtgtaagtgcagcccgtcttacaccgtgcggcacaggcactagtactgatgtcgtatacagggcttttgacatctacaatgataaagtagctggttttgctaaattcctaaaaactaattgttgtcgcttccaagaaaaggacgaagatgacaatttaattgattcttactttgtagttaagagacacactttctctaactaccaacatgaagaaacaatttataatttacttaaggattgtccagctgttgctaaacatgacttctttaagtttagaatagacggtgacatggtaccacatatatcacgtcaacgtcttactaaatacacaatggcagacctcgtctatgctttaaggcattttgatgaaggtaattgtgacacattaaaagaaatacttgtcacatacaattgttgtgatgatgattatttcaataaaaaggactggtatgattttgtagaaaacccagatatattacgcgtatacgccaacttaggtgaacgtgtacgccaagctttgttaaaaacagtacaattctgtgatgccatgcgaaatgctggtattgttggtgtactgacattagataatcaagatctcaatggtaactggtatgatttcggtgatttcatacaaaccacgccaggtagtggagttcctgttgtagattcttattattcattgttaatgcctatattaaccttgaccagggctttaactgcagagtcacatgttgacactgacttaacaaagccttacattaagtgggatttgttaaaatatgacttcacggaagagaggttaaaactctttgaccgttattttaaatattgggatcagacataccacccaaattgtgttaactgtttggatgacagatgcattctgcattgtgcaaactttaatgttttattctctacagtgttcccacttacaagttttggaccactagtgagaaaaatatttgttgatggtgttccatttgtagtttcaactggataccacttcagagagctaggtgttgtacataatcaggatgtaaacttacatagctctagacttagttttaaggaattacttgtgtatgctgctgaccctgctatgcacgctgcttctggtaatctattactagataaacgcactacgtgcttttcagtagctgcacttactaacaatgttgcttttcaaactgtcaaacccggtaattttaacaaagacttctatgactttgctgtgtctaagggtttctttaaggaaggaagttctgttgaattaaaacacttcttctttgctcaggatggtaatgctgctatcagcgattatgactactatcgttataatctaccaacaatgtgtgatatcagacaactactatttgtagttgaagttgttgataagtactttgattgttacgatggtggctgtattaatgctaaccaagtcatcgtcaacaacctagacaaatcagctggttttccatttaataaatggggtaaggctagactttattatgattcaatgagttatgaggatcaagatgcacttttcgcatatacaaaacgtaatgtcatccctactataactcaaatgaatcttaagtatgccattagtgcaaagaatagagctcgcaccgtagctggtgtctctatctgtagtactatgaccaatagacagtttcatcaaaaattattgaaatcaatagccgccactagaggagctactgtagtaattggaacaagcaaattctatggtggttggcacaacatgttaaaaactgtttatagtgatgtagaaaaccctcaccttatgggttgggattatcctaaatgtgatagagccatgcctaacatgcttagaattatggcctcacttgttcttgctcgcaaacatacaacgtgttgtagcttgtcacaccgtttctatagattagctaatgagtgtgctcaagtattgagtgaaatggtcatgtgtggcggttcactatatgttaaaccaggtggaacctcatcaggagatgccacaactgcttatgctaatagtgtttttaacatttgtcaagctgtcacggccaatgttaatgcacttttatctactgatggtaacaaaattgccgataagtatgtccgcaatttacaacacagactttatgagtgtctctatagaaatagagatgttgacacagactttgtgaatgagttttacgcatatttgcgtaaacatttctcaatgatgatactttctgacgatgctgttgtgtgtttcaatagcacttatgcatctcaaggtctagtggctagcataaagaactttaagtcagttctttattatcaaaacaatgtttttatgtctgaagcaaaatgttggactgagactgaccttactaaaggacctcatgaattttgctctcaacatacaatgctagttaaacagggtgatgattatgtgtaccttccttacccagatccatcaagaatcctaggggccggctgttttgtagatgatatcgtaaaaacagatggtacacttatgattgaacggttcgtgtctttagctatagatgcttacccacttactaaacatcctaatcaggagtatgctgatgtctttcatttgtacttacaatacataagaaagctacatgatgagttaacaggacacatgttagacatgtattctgttatgcttactaatgataacacttcaaggtattgggaacctgagttttatgaggctatgtacacaccgcatacagtcttacagtgatga

SEQ ID NO: 369 - DNA, 2802 bp, synthetic construct
  source 1..2802: mol_type = other DNA; note = Nsp12 codon optimized
atgtctgcctgcacaattgtgttcaagcgggtgtgtggagtgtctgcagcgcgattaactccctgtggaaccggcacctcaacagacgtagtgtaccgtgccttcgatatttacaatgataaggtggccgggttcgcgaaattcctaaagacgaactgttgcaggttccaggagaaggatgaagatgacaatctcatagattcttatttcgtggttaaacggcatacatttagtaattaccaacatgaagaaacaatctacaacctcctcaaagactgtcctgctgtggcaaaacatgacttcttcaagttccggattgacggcgacatggttccacacatctctcggcagagattaacaaagtacaccatggctgaccttgtatatgcactgcgacactttgatgaaggaaattgcgatactctgaaagagattcttgttacctacaactgctgtgatgacgactacttcaacaagaaagactggtacgactttgtagaaaacccagatatcctcagagtttacgccaacttaggagagcgcgtaagacaagccctgttaaaaacagttcagttctgtgatgccatgaggaatgcaggaatcgtgggagtcttgaccctggacaaccaggacttgaatgggaactggtatgacttcggggatttcatccagactacacccggcagcggagtgccagtggtggatagctattactccttgctgatgcccatccttacgttgacaagagccctgacagcagagagccatgtggacactgaccttaccaaaccctacatcaagtgggacttactcaagtatgacttcacagaagagcggctaaagttgttcgatcgctactttaaatattgggatcagacctatcatcccaactgtgtgaattgtctggatgacaggtgcatattgcactgtgcaaacttcaacgttcttttttccacggttttccccctgaccagctttgggcctctggtgagaaagatctttgtcgacggggtaccatttgttgtcagtaccggctaccatttcagggaactcggtgtcgtgcacaatcaggatgtaaacctgcacagcagccggctaagctttaaagaactgcttgtttatgctgctgatccagccatgcacgctgccagcggaaatttactcctggacaagcgtactacctgtttcagtgtggcagccctcaccaacaacgtagccttccaaaccgtgaaaccaggcaactttaacaaagatttctacgactttgccgtttcaaaggggttttttaaggaggggagttccgtggaactgaagcattttttctttgcacaagacggtaatgctgctataagcgactatgattattaccggtataatctgccaacgatgtgtgatattaggcaactgctcttcgtggtagaggtcgtggacaaatactttgactgctacgatggcggctgcatcaatgctaatcaggtgattgtcaacaatctcgacaagagtgcgggctttcctttcaataaatggggcaaggcccgcctctactatgacagcatgagctacgaggaccaagatgctctgtttgcttatacaaagagaaatgtgatccctaccatcacacagatgaaccttaaatatgccatctccgcgaagaaccgtgcccgaacagttgctggtgtctccatttgttctaccatgacaaaccgccagttccaccagaagctgttgaagagcatagcagctactaggggcgccaccgtcgtaatcgggacatccaagttttatggagggtggcacaacatgcttaaaacggtttactcagatgtggagaatccccacctaatgggctgggactaccccaagtgtgaccgagcaatgccgaacatgctccgcattatggcaagtctggtcctcgccagaaaacacacgacttgctgctcattgtcacacaggttttatcgtctggccaatgaatgtgcccaggtcctgtcagagatggtcatgtgcggaggatccttatatgtgaagccaggtggcactagttctggtgatgccacaactgcgtacgcaaatagtgtgttcaacatctgccaggctgtcactgcgaatgttaatgcgttgctgtccactgatggaaacaaaattgcagacaaatacgtgcgcaacctgcagcatcgtttatatgagtgcctatacagaaacagagatgtggacaccgattttgtgaacgagttctatgcctacctgaggaagcatttctcaatgatgatcctgtcggatgatgccgttgtctgctttaattctacttatgcttcacagggcctggtggcttccataaaaaacttcaagtctgtgctgtattaccagaacaatgtgtttatgtctgaagctaagtgctggaccgagacggacctcaccaagggtccccatgagttctgctcccagcacacaatgcttgtgaagcagggggacgattatgtgtatctcccttaccctgacccttcgaggatactgggcgccgggtgttttgtagacgacattgtcaaaactgacggtactctaatgatcgagcggttcgtgagcctggctattgatgcttacccactgaccaagcacccgaatcaagagtacgcagatgtctttcacctttaccttcagtacattcggaagcttcatgatgagctgaccggccacatgctggacatgtattcagtgatgctgacaaatgacaatacatctaggtactgggagcctgaattttatgaagctatgtatactcctcataccgtgttgcagtgataa

SEQ ID NO: 370 - DNA, 1590 bp, synthetic construct
  source 1..1590: mol_type = other DNA; note = Nsp13
atggctgaaaatgtaacaggactctttaaagattgtagtaaggtaatcactgggttacatcctacacaggcacctacacacctcagtgttgacactaaattcaaaactgaaggtttatgtgttgacgtacctggcatacctaaggacatgacctatagaagactcatctctatgatgggttttaaaatgaattatcaagttaatggttaccctaacatgtttatcacccgcgaagaagctataagacatgtacgtgcatggattggcttcgatgtcgaggggtgtcatgctactagagaagctgttggtaccaatttacctttacagctaggtttttctacaggtgttaacctagttgctgtacctacaggttatgttgatacacctaataatacagatttttccagagttagtgctaaaccaccgcctggagatcaatttaaacacctcataccacttatgtacaaaggacttccttggaatgtagtgcgtataaagattgtacaaatgttaagtgacacacttaaaaatctctctgacagagtcgtatttgtcttatgggcacatggctttgagttgacatctatgaagtattttgtgaaaataggacctgagcgcacctgttgtctatgtgatagacgtgccacatgcttttccactgcttcagacacttatgcctgttggcatcattctattggatttgattacgtctataatccgtttatgattgatgttcaacaatggggttttacaggtaacctacaaagcaaccatgatctgtattgtcaagtccatggtaatgcacatgtagctagttgtgatgcaatcatgactaggtgtctagctgtccacgagtgctttgttaagcgtgttgactggactattgaatatcctataattggtgatgaactgaagattaatgcggcttgtagaaaggttcaacacatggttgttaaagctgcattattagcagacaaattcccagttcttcacgacattggtaaccctaaagctattaagtgtgtacctcaagctgatgtagaatggaagttctatgatgcacagccttgtagtgacaaagcttataaaatagaagaattattctattcttatgccacacattctgacaaattcacagatggtgtatgcctattttggaattgcaatgtcgatagatatcctgctaattccattgtttgtagatttgacactagagtgctatctaaccttaacttgcctggttgtgatggtggcagtttgtatgtaaataaacatgcattccacacaccagcttttgataaaagtgcttttgttaatttaaaacaattaccatttttctattactctgacagtccatgtgagtctcatggaaaacaagtagtgtcagatatagattatgtaccactaaagtctgctacgtgtataacacgttgcaatttaggtggtgctgtctgtagacatcatgctaatgagtacagattgtatctcgatgcttataacatgatgatctcagctggctttagcttgtgggtttacaaacaatttgatacttataacctctggaacacttttacaagacttcagtgatga

SEQ ID NO: 371 - DNA, 1590 bp, synthetic construct
  source 1..1590: mol_type = other DNA; note = Nsp13 codon optimized
atggctgagaatgtcacagggctgtttaaggactgttccaaggtgataacaggactgcacccaacacaggcccctacgcacttgtctgttgacacaaaattcaaaacagaaggactctgtgtggatgtacccggcatccctaaagacatgacctatcgcaggctcatcagtatgatgggcttcaagatgaactaccaggtcaatggctacccaaatatgttcatcaccagggaggaagctattaggcatgtgagggcctggattggttttgacgtggaaggctgtcatgcaacaagagaagcagtggggaccaacttacctctgcagctggggttcagcactggggtcaacctggttgctgtcccaactggatatgttgatacccccaacaacacagacttctcacgggtctctgcaaagcctccacctggggatcagttcaagcacctgatcccattaatgtataaaggtctgccctggaatgtggtaaggatcaaaattgttcagatgctgagtgacactctgaagaacttgagtgacagagttgtgtttgtcctgtgggctcatggctttgagctgaccagcatgaagtactttgtgaaaattggaccagagagaacgtgctgcctgtgtgaccgacgggcaacttgtttttctaccgcatcagatacttacgcctgctggcaccatagtatcggctttgactatgtctacaaccctttcatgattgatgtccagcaatggggcttcacaggaaatttgcagtccaaccacgacctgtactgccaggtccatgggaatgctcacgtggcctcctgcgatgctatcatgacacgatgtctggctgtgcatgagtgctttgtgaagcgtgtcgactggaccatcgaataccccattattggcgacgagctaaaaataaatgcagcgtgtagaaaagtgcagcacatggtggtcaaggcagcactccttgctgacaagtttccagtattacatgacatcggcaacccaaaggccattaagtgtgttcctcaagcggatgtggagtggaagttctatgatgcccagccgtgctctgataaagcctacaagatagaagaactcttttattcttacgctactcacagcgacaaatttacagatggagtttgcctcttctggaactgcaatgtcgatagatatccggccaacagcatagtgtgccgctttgatacgcgcgtgctatccaacttgaacctcccgggttgtgatggcggttcgctttatgtaaataaacatgctttccacacacctgccttcgacaagtccgcctttgtgaatctgaaacaacttcccttcttctactacagcgacagcccctgcgagtcccacgggaagcaggtggtgagtgatattgactatgtcccccttaagtcagcgacttgcatcactcgctgtaaccttggaggagctgtttgtcggcaccacgcgaatgagtaccgactctacctggacgcctataacatgatgatctctgccggtttctcactatgggtatataagcagtttgatacctacaatttgtggaacaccttcacccggctccaatgataa

SEQ ID NO: 372 - DNA, 498 bp, synthetic construct
  source 1..498: mol_type = other DNA; note = Orf7a/7b
atgaaaattattcttttcttggcactgataacactcgctacttgtgagctttatcactaccaagagtgtgttagaggtacaacagtacttttaaaagaaccttgctcttctggaacatacgagggcaattcaccatttcatcctctagctgataacaaatttgcactgacttgctttagcactcaatttgcttttgcttgtcctgacggcgtaaaacacgtctatcagttacgtgccagatcagtttcacctaaactgttcatcagacaagaggaagttcaagaactttactctccaatttttcttattgttgcggcaatagtgtttataacactttgcttcacactcaaaagaaagacagaatgtgaactttcattaattgacttctatttgtgctttttagcctttctgttattccttgttttaattatgcttattatcttttggttctcacttgaactgcaagatcataatgaaacttgtcacgcctaatgatga

SEQ ID NO: 373 - DNA, 498 bp, synthetic construct
  source 1..498: mol_type = other DNA; note = Orf7a/7b codon optimized
atgaagatcattttgtttctagcattaataactctagccacctgtgagctctaccactaccaggagtgtgtgaggggtaccactgtactgctgaaggagccctgcagctctggaacatatgaaggcaacagccctttccaccctttggctgataacaagtttgctcttacgtgcttttctactcagtttgcatttgcctgcccagatggggtgaagcatgtgtatcagctgcgagcgcgcagtgtttccccaaaactcttcattcggcaagaagaggtccaagaactgtatagtcccatctttctcattgtggctgccatcgtgttcatcacactatgtttcaccctgaaaagaaaaacagaatgtgaactttcattgattgacttctacctgtgcttcctggccttcctcttatttcttgttctcatcatgctgatcatcttctggttctccctggagctgcaggaccacaatgagacctgccatgcatgataatga

SEQ ID NO: 374 - DNA, 675 bp, synthetic construct
  source 1..675: mol_type = other DNA; note = Membrane Protein
atggcagattccaacggtactattaccgttgaagagcttaaaaagctccttgaagaatggaacctagtaataggtttcctattccttacatggatttgtcttctacaatttgcctatgccaacaggaataggtttttgtatataattaagttaattttcctctggctgttatggccagtaactttaacttgttttgtgcttgctgctgtttacagaataaattggatcaccggtggaattgctatcgcaatggcttgtcttgtaggcttgatgtggctcagctacttcattgcttctttcagactgtttgcgcgtacgcgttccatgtggtcatttaatccagaaactaacattcttctcaacgtgccactccatggcactattctgaccagaccgcttctagaaagtgaactcgtaatcggagctgtgatccttcgtggacatcttcgtattgctggacaccatctaggacgctgtgacatcaaggacctgcctaaagaaatcactgttgctacatcacgaacgctttcttattacaaattgggagcttcgcagcgtgtagcaggtgactcaggttttgctgcatacagtcgctacaggattggcaactataaattaaacacagaccattccagtagcagtgacaatattgctttgcttgtacagtaatgatga

SEQ ID NO: 375 - DNA, 675 bp, synthetic construct
  source 1..675: mol_type = other DNA; note = Membrane Protein codon optimized
atggctgattcaaatggcaccatcactgtggaggaactgaagaagctccttgaggagtggaacctggtgattggcttcctcttcttaacctggatctgcctgctgcagtttgcttatgccaacagaaatcgcttcctgtacatcatcaagctcatctttctctggctactttggcctgtaactttgacctgctttgtgctggcagctgtgtacagaatcaactggattactggaggaattgcgatagccatggcctgtttagtggggctcatgtggctgagctacttcatcgcttccttccggctgtttgcccgaacgaggagcatgtggagcttcaacccagaaacaaatatcctgcttaatgttccgctgcatggaaccatactcaccaggcctctattggaatctgagctggtcattggagctgtcatactccggggccatttgcgaattgctggccaccacctgggtcgttgtgacatcaaagatctgcccaaggagatcacagtggccacttctagaacattgtcttactataaacttggggcgagtcagagggttgcaggtgattcgggctttgcagcctatagccgctataggattgggaactacaaactaaatacagaccactcatcctccagtgacaacattgcattgcttgtccaatgataatga

SEQ ID NO: 376 - DNA, 234 bp, synthetic construct
  source 1..234: mol_type = other DNA; note = Envelope Protein
atgtactcattcgtttcggaagagataggtacgttaatagttaatagcgtacttctttttcttgctttcgtggtattcttgctagttacactagccatccttactgcgcttcgattgtgtgcgtactgctgcaatattgttaacgtgagtcttgtaaaaccttctttttacgtttactctcgtgttaaaaatctgaattcttctagagttcctgatcttctggtctaatgatga

SEQ ID NO: 377 - DNA, 234 bp, synthetic construct
  source 1..234: mol_type = other DNA; note = Envelope Protein codon optimized
atgtacagctttgttagtgaagagattggcactctaatagtaaattctgtgctgctcttccttgcttttgtggtgttcctgctggtcaccctggccatcctcacagcattaaggctctgtgcctactgctgcaacatcgtcaatgtgtctctggtgaaaccttccttctatgtgtattcacgggtgaagaacttgaacagctccagagttccagacttgcttgtatgataatga

SEQ ID NO: 378 - DNA, 1257 bp, synthetic construct
  source 1..1257: mol_type = other DNA; note = Nucleocapsid Protein
atgtctgataatggaccccaaaatcagcgaaatgcactccgcattacgtttggtggaccctcagattcaactggcagtaaccagaatggtggggcgcgatcaaaacaacgtcggccccaaggtttacccaataatactgcgtcttggttcaccgctctcactcaacatggcaaggaagaccttaaattccctcgaggacaaggcgttccaattaacaccaatagcagtccagatgaccaaattggctactaccgaagagctaccagacgaattcgtggtggtgacggtaaaatgaaagatctcagtccaagatggtatttctactacctaggaactgggccagaagctggacttccctatggtgctaacaaagacggcatcatatgggttgcaactgagggagccttgaatacaccaaaagatcacattggcacccgcaatcctgctaacaatgctgcaatcgtgctacaacttcctcaaggaacaacattgccaaaaggcttctacgcagaagggagcagaggcggcagtcaagcctcttctcgttcctcatcacgtagtcgcaacagttcaagaaattcaactccaggcagcagtaaacgaacttctcctgctagaatggctggcaatggcggtgatgctgctcttgctttgctgctgcttgacagattgaaccagcttgagagcaaaatgtctggtaaaggccaacaacaacaaggccaaactgtcactaagaaatctgctgctgaggcttctaagaagcctcggcaaaaacgtactgccactaaagcatacaatgtaacacaagctttcggcagacgtggtccagaacaaacccaaggaaattttggggaccaggaactaatcagacaaggaactgattacaaacattggccgcaaattgcacaatttgcccccagcgcttcagcgttcttcggaatgtcgcgcattggcatggaagtcacaccttcgggaacgtggttgacctacacaggtgccatcaaattggatgacaaagatccaaatttcaaagatcaagtcattttgctgaataagcatattgacgcatacaaaacattcccaccaacagagcctaaaaaggacaaaaagaagaaggctgatgaaactcaagccttaccgcagagacagaagaaacagcaaactgtgactcttcttcctgctgcagatttggatgatttctccaaacaattgcaacaatccatgagccgtgctgactcaactcaggcctaatgatga

SEQ ID NO: 379 - DNA, 1257 bp, synthetic construct
  source 1..1257: mol_type = other DNA; note = Nucleocapsid Protein codon optimized
atgtcagacaatgggccccagaaccagagaaatgcccttcgcatcacgtttggtggccctagtgacagcaccggcagcaatcagaatggaggtgcccgcagtaaacaaaggagaccacagggactgccaaacaacacagcatcctggtttactgcacttacgcagcatggtaaggaggacctgaagttcccaagaggacagggagtccccatcaacaccaacagctcaccagatgatcagatcggctattaccggcgggctactcgccgcatacgagggggcgatggcaagatgaaggatctaagtccgcgttggtacttctactatctgggcacagggcctgaagctggcctgccttatggggccaataaggatggcatcatctgggtggccactgagggggctttgaataccccaaaagaccacatcgggactcgaaaccctgccaacaatgcagccattgtccttcagctcccacaagggacaacattacccaagggcttctatgcagagggctccaggggaggttctcaagccagcagccggagcagctcgcggtcccggaactcaagccgaaattccactcctggcagctccaagagaacatcacctgcgaggatggctggaaatggaggcgatgctgctctggccctccttttgctggacaggctcaaccagctggagagtaaaatgagtggaaaggggcagcagcaacagggccagactgtgaccaagaagtctgcagcagaagcgtccaagaaacccaggcagaaaaggacagccacaaaagcctataatgtgacacaagcctttgggagaagagggccagagcagacccagggaaactttggagaccaggagctgattcgtcaaggtacagactacaagcactggccacagattgctcagtttgctccctctgcatcagccttcttcggcatgagcaggataggtatggaggtgactccgagcggaacctggctgacctacaccggagccatcaagctggatgacaaggatcccaacttcaaggaccaggtaattctcttaaacaagcatattgatgcctacaaaacctttcctccaacagaacccaaaaaggacaaaaaaaaaaaagctgatgaaactcaggccctacctcagcggcaaaagaaacaacagacggttaccctactcccggctgcagatttggacgacttctctaagcagctgcagcagtccatgtccagagctgactctacccaagcatgataatga

SEQ ID NO: 380 - DNA, 3810 bp, synthetic construct
  source 1..3810: mol_type = other DNA; note = Spike Protein
atgttcgtgttcctggtgctgctgcccctggtgagcagccagtgcgtgaacctgatcaccaggacccagagctacaccaacagcttcaccaggggcgtgtactaccccgacaaggtgttcaggagcagcgtgctgcacagcacccaggacctgttcctgcccttcttcagcaacgtgacctggttccacgccatcagcggcaccaacggcaccaagaggttcgacaaccccgtgctgcccttcaacgacggcgtgtacttcgccagcaccgagaagagcaacatcatcaggggctggatcttcggcaccaccctggacagcaagacccagagcctgctgatcgtgaacaacgccaccaacgtggtgatcaaggtgtgcgagttccagttctgcaacgaccccttcctggacgtgtactaccacaagaacaacaagagctggatggagagcgagttcagggtgtacagcagcgccaacaactgcaccttcgagtacgtgagccagcccttcctgatggacctggagggcaagcagggcaacttcaagaacctgagggagttcgtgttcaagaacatcgacggctacttcaagatctacagcaagcacacccccatcaacctgggcagggacctgccccagggcttcagcgccctggagcccctggtggacctgcccatcggcatcaacatcaccaggttccagaccctgctggccctgcacaggagctacctgacccccggcgacagcagcagcggctggaccgccggcgccgccgcctactacgtgggctacctgcagcccaggaccttcctgctgaagtacaacgagaacggcaccatcaccgacgccgtggactgcgccctggaccccctgagcgagaccaagtgcaccctgaagagcttcaccgtggagaagggcatctaccagaccagcaacttcagggtgcagcccaccgagagcatcgtgaggttccccaacatcaccaacctgtgccccttcgacgaggtgttcaacgccaccaggttcgccagcgtgtacgcctggaacaggaagaggatcagcaactgcgtggccgactacagcgtgctgtacaacttcgcccccttcttcgccttcaagtgctacggcgtgagccccaccaagctgaacgacctgtgcttcaccaacgtgtacgccgacagcttcgtgatcaggggcaacgaggtgagccagatcgcccccggccagaccggcaacatcgccgactacaactacaagctgcccgacgacttcaccggctgcgtgatcgcctggaacagcaacaagctggacagcaaggtgggcggcaactacaactacaggtacaggctgttcaggaagagcaacctgaagcccttcgagagggacatcagcaccgagatctaccaggccggcaacaagccctgcaacggcgtggccggcgtgaactgctacttccccctgaggagctacggcttcaggcccacctacggcgtgggccaccagccctacagggtggtggtgctgagcttcgagctgctgcacgcccccgccaccgtgtgcggccccaagaagagcaccaacctggtgaagaacaagtgcgtgaacttcaacttcaacggcctgaccggcaccggcgtgctgaccgagagcaacaagaagttcctgcccttccagcagttcggcagggacatcgccgacaccaccgacgccgtgagggacccccagaccctggagatcctggacatcaccccctgcagcttcggcggcgtgagcgtgatcacccccggcaccaacaccagcaaccaggtggccgtgctgtaccagggcgtgaactgcaccgaggtgcccgtggccatccacgccgaccagctgacccccacctggagggtgtacagcaccggcagcaacgtgttccagaccagggccggctgcctgatcggcgccgagtacgtgaacaacagctacgagtgcgacatccccatcggcgccggcatctgcgccagctaccagacccagaccaagagccaccagcaggcccagagcgtggccagccagagcatcatcgcctacaccatgagcctgggcgccgagaacagcgtggcctacagcaacaacagcatcgccatccccaccaacttcaccatcagcgtgaccaccgagatcctgcccgtgagcatgaccaagaccagcgtggactgcaccatgtacatctgcggcgacagcaccgagtgcagcaacctgctgctgcagtacggcagcttctgcacccagctgaagagggccctgaccggcatcgccgtggagcaggacaagaacacccaggaggtgttcgcccaggtgaagcagatctacaagaccccccccatcaagtacttcggcggcttcaacttcagccagatcctgcccgaccccagcaagcccagcaagaggagcttcatcgaggacctgctgttcaacaaggtgaccctggccgacgccggcttcatcaagcagtacggcgactgcctgggcgacatcgccgccagggacctgatctgcgcccagaagttcaacggcctgaccgtgctgccccccctgctgaccgacgagatgatcgcccagtacaccagcgccctgctggccggcaccatcaccagcggctggaccttcggcgccggcgccgccctgcagatccccttcgccatgcagatggcctacaggttcaacggcatcggcgtgacccagaacgtgctgtacgagaaccagaagctgatcgccaaccagttcaacagcgccatcggcaagatccaggacagcctgagcagcaccgccagcgccctgggcaagctgcaggacgtggtgaaccacaacgcccaggccctgaacaccctggtgaagcagctgagcagcaagttcggcgccatcagcagcgtgctgaacgacatcctgagcaggctggacccccccgaggccgaggtgcagatcgacaggctgatcaccggcaggctgcagagcctgcagacctacgtgacccagcagctgatcagggccgccgagatcagggccagcgccaacctggccgccaccaagatgagcgagtgcgtgctgggccagagcaagagggtggacttctgcggcaagggctaccacctgatgagcttcccccagagcgccccccacggcgtggtgttcctgcacgtgacctacgtgcccgcccaggagaagaacttcaccaccgcccccgccatctgccacgacggcaaggcccacttccccagggagggcgtgttcgtgagcaacggcacccactggttcgtgacccagaggaacttctacgagccccagatcatcaccaccgacaacaccttcgtgagcggcaactgcgacgtggtgatcggcatcgtgaacaacaccgtgtacgaccccctgcagcccgagctggacagcttcaaggaggagctggacaagtacttcaagaaccacaccagccccgacgtggacctgggcgacatcagcggcatcaacgccagcgtggtgaacatccagaaggagatcgacaggctgaacgaggtggccaagaacctgaacgagagcctgatcgacctgcaggagctgggcaagtacgagcagtacatcaagtggccctggtacatctggctgggcttcatcgccggcctgatcgccatcgtgatggtgaccatcatgctgtgctgcatgaccagctgctgcagctgcctgaagggctgctgcagctgcggcagctgctgcaagttcgacgaggacgacagcgagcccgtgctgaagggcgtgaagctgcactacacctgatga

SEQ ID NO: 381 - DNA, 3810 bp, synthetic construct
  source 1..3810: mol_type = other DNA; note = Spike Protein codon optimized
atgtttgtctttttggtactcctccctcttgtctcgtctcagtgtgtcaacttgattacacgcactcaaagttacaccaactcctttacccgaggagtctactatccagataaagtgttcagatctagcgtgttgcatagcacgcaggatctctttctcccgtttttcagcaacgtgacctggttccatgcaatatctggcacaaatgggaccaagcggtttgacaatcctgtgttaccgttcaatgatggcgtgtacttcgccagtaccgaaaagtccaacatcatcagaggctggatcttcggcacaaccctggattctaaaactcagtcccttctgatagtcaacaacgcaaccaacgtggtgataaaggtgtgtgaattccagttttgtaacgaccccttccttgacgtttattatcacaagaataacaagagttggatggagagcgaatttcgggtatattcctcagcaaacaactgcacatttgaatatgtgagtcagcccttcctcatggacctcgaaggaaagcaaggcaactttaagaacctgagggagttcgtgttcaagaacatcgacggctattttaagatctactctaagcacacccccatcaatcttggcagagacctaccccagggcttttcggccttggagcctctggtggatctccccatcggtatcaacatcacccgattccaaactctcctggcactgcacaggtcatatctaacacccggggacagcagcagtgggtggacagctggcgccgcggcttactatgttggctacctgcagccacgtaccttcctgctgaaatacaatgaaaacggaacgattacagatgcggtggactgtgcactggatccattgtctgaaactaaatgtacactaaaatcctttactgttgagaagggcatctaccaaacttctaatttcagggttcagcccaccgaatccatcgttcgcttccccaacattactaatctgtgtccatttgatgaagtgtttaatgccacccgcttcgcttccgtgtatgcatggaacaggaagagaatctcaaactgtgtggcagactattctgttctgtacaattttgctcctttctttgccttcaagtgctatggagtgtcacctacaaagctcaatgacctctgcttcacaaatgtctacgccgattcttttgtgattcgtggaaatgaagtttcccagatcgcacccggccagacgggaaacatagccgactacaactacaagctgccggatgacttcacgggctgtgtcattgcttggaattcaaataaattagatagtaaagtgggggggaactataattaccgctaccggctttttcgcaaatcaaatttgaagccatttgagcgtgatatttcgactgaaatctatcaggctgggaacaaaccctgcaacggggtagcaggagtcaattgctactttcctttacgcagctacgggttccgacctacctatggtgtgggccaccaaccatacagggtggttgtcttgtccttcgagcttcttcatgccccggcaacggtgtgcggtcctaaaaagagtaccaatctagtaaagaataagtgtgtgaactttaacttcaatggtttgaccggcactggcgttttgactgagtccaacaagaagttcttaccctttcagcagttcgggcgggacatcgccgacactacagatgcagtgcgcgatccgcagacactggagattttggacattaccccttgctcctttggtggagtatctgtaataaccccaggcacgaacactagtaatcaagtcgccgtgctgtatcaaggtgttaactgtaccgaggtgcctgtggctattcatgctgaccagctcactcccacatggagagtctactctacaggtagcaatgtatttcaaacaagggctgggtgcctgataggagccgagtacgtgaataactcttatgagtgtgacatcccaatcggagctgggatttgtgcctcttaccagacccagacgaagtcacaccagcaggctcaatcagtggcgtctcagagtatcatcgcctacactatgtccctcggagcagaaaattcagttgcatacagcaataactccatcgccattccaactaacttcactatatcggtgaccacagagatcctgccagtcagcatgacaaaaacatcagtagactgcaccatgtatatatgcggggacagcacagaatgttctaacctgctgttgcaatatgggagcttctgcactcagttgaagagggctctgactggaatcgctgtggagcaggacaagaatacccaggaagtgttcgcccaggtgaagcagatatacaaaacccctccaatcaaatactttggcgggtttaacttcagccaaattctgcccgatccctccaagcctagtaaaaggtccttcattgaagatctgctgttcaacaaagtcacactggcagatgctggattcatcaagcagtatggtgactgtctgggcgacatcgcagcgcgggatctgatttgtgcacagaagtttaatgggcttacagtcttgcctcctctgctgacagacgagatgattgcccagtacacgtctgccttgctcgctggtaccataaccagcggatggaccttcggagccggcgctgcccttcagatccctttcgctatgcagatggcctatagatttaatggcatcggagtgactcagaacgttctctacgagaatcagaaactgattgccaaccagtttaacagtgcgatcggaaagattcaagacagtctatccagcacggcttctgcactgggtaaactgcaagatgtggttaaccacaacgcccaggccctgaacacactcgtgaaacagctctcttccaagttcggtgccatcagctcagttcttaacgatatactgagtagactagaccctccagaggccgaagtgcagatcgacaggcttatcacaggtcggctgcagtctctacaaacctatgtcacacaacagttaatcagagcagctgagatccgagcttccgcgaacctcgcggcaacaaagatgtctgagtgcgtcctggggcagagcaagcgggtagatttctgtgggaaaggataccatctgatgtcatttccccagagcgccccacatggtgtagtttttctgcatgtgacctacgtccctgcccaagaaaaaaatttcactacggctccagctatctgccacgatggaaaagcgcacttcccccgagagggcgtttttgtcagtaatggtacccactggtttgtgacacagagaaatttctatgagccacagataattactaccgacaacacatttgtctctgggaattgtgatgtcgtaattggaattgtgaacaatacagtatatgatccattgcagcctgagctagactctttcaaagaagagctggataaatatttcaagaaccatacctcgcctgacgtggacttgggggatatctccggaataaatgcatccgtggtgaatatccagaaggaaattgatagactgaatgaggtggccaaaaacctcaatgagagtttgattgaccttcaggagttaggcaagtatgaacagtacattaagtggccatggtacatctggctgggtttcattgccggcctcatagcaattgtcatggtgaccatcatgctctgctgcatgacttcctgctgcagctgccttaaaggctgctgtagctgtgggtcctgttgcaaatttgatgaggacgactcagagccggtgctgaagggagttaaattgcactacacttgataa

SEQ ID NO: 382 - DNA, 3810 bp, synthetic construct
  source 1..3810: mol_type = other DNA; note = Spike Protein
atgttcgtgttcctggtgctgctgcccctggtgagcagccagtgcgtgaacctgatcaccaggacccagagctacaccaacagcttcaccaggggcgtgtactaccccgacaaggtgttcaggagcagcgtgctgcacagcacccaggacctgttcctgcccttcttcagcaacgtgacctggttccacgccatcagcggcaccaacggcaccaagaggttcgacaaccccgtgctgcccttcaacgacggcgtgtacttcgccagcaccgagaagagcaacatcatcaggggctggatcttcggcaccaccctggacagcaagacccagagcctgctgatcgtgaacaacgccaccaacgtggtgatcaaggtgtgcgagttccagttctgcaacgaccccttcctggacgtgtactaccacaagaacaacaagagctggatggagagcgagttcagggtgtacagcagcgccaacaactgcaccttcgagtacgtgagccagcccttcctgatggacctggagggcaagcagggcaacttcaagaacctgagggagttcgtgttcaagaacatcgacggctacttcaagatctacagcaagcacacccccatcaacctgggcagggacctgccccagggcttcagcgccctggagcccctggtggacctgcccatcggcatcaacatcaccaggttccagaccctgctggccctgcacaggagctacctgacccccggcgacagcagcagcggctggaccgccggcgccgccgcctactacgtgggctacctgcagcccaggaccttcctgctgaagtacaacgagaacggcaccatcaccgacgccgtggactgcgccctggaccccctgagcgagaccaagtgcaccctgaagagcttcaccgtggagaagggcatctaccagaccagcaacttcagggtgcagcccaccgagagcatcgtgaggttccccaacatcaccaacctgtgccccttcgacgaggtgttcaacgccaccaggttcgccagcgtgtacgcctggaacaggaagaggatcagcaactgcgtggccgactacagcgtgctgtacaacttcgcccccttcttcgccttcaagtgctacggcgtgagccccaccaagctgaacgacctgtgcttcaccaacgtgtacgccgacagcttcgtgatcaggggcaacgaggtgagccagatcgcccccggccagaccggcaacatcgccgactacaactacaagctgcccgacgacttcaccggctgcgtgatcgcctggaacagcaacaagctggacagcaaggtgggcggcaactacaactacaggtacaggctgttcaggaagagcaacctgaagcccttcgagagggacatcagcaccgagatctaccaggccggcaacaagccctgcaacggcgtggccggcgtgaactgctacttccccctgaggagctacggcttcaggcccacctacggcgtgggccaccagccctacagggtggtggtgctgagcttcgagctgctgcacgcccccgccaccgtgtgcggccccaagaagagcaccaacctggtgaagaacaagtgcgtgaacttcaacttcaacggcctgaccggcaccggcgtgctgaccgagagcaacaagaagttcctgcccttccagcagttcggcagggacatcgccgacaccaccgacgccgtgagggacccccagaccctggagatcctggacatcaccccctgcagcttcggcggcgtgagcgtgatcacccccggcaccaacaccagcaaccaggtggccgtgctgtaccagggcgtgaactgcaccgaggtgcccgtggccatccacgccgaccagctgacccccacctggagggtgtacagcaccggcagcaacgtgttccagaccagggccggctgcctgatcggcgccgagtacgtgaacaacagctacgagtgcgacatccccatcggcgccggcatctgcgccagctaccagacccagaccaagagccaccagcaggcccagagcgtggccagccagagcatcatcgcctacaccatgagcctgggcgccgagaacagcgtggcctacagcaacaacagcatcgccatccccaccaacttcaccatcagcgtgaccaccgagatcctgcccgtgagcatgaccaagaccagcgtggactgcaccatgtacatctgcggcgacagcaccgagtgcagcaacctgctgctgcagtacggcagcttctgcacccagctgaagagggccctgaccggcatcgccgtggagcaggacaagaacacccaggaggtgttcgcccaggtgaagcagatctacaagaccccccccatcaagtacttcggcggcttcaacttcagccagatcctgcccgaccccagcaagcccagcaagaggagccccatcgaggacctgctgttcaacaaggtgaccctggccgacgccggcttcatcaagcagtacggcgactgcctgggcgacatcgccgccagggacctgatctgcgcccagaagttcaacggcctgaccgtgctgccccccctgctgaccgacgagatgatcgcccagtacaccagcgccctgctggccggcaccatcaccagcggctggaccttcggcgccggccccgccctgcagatccccttccccatgcagatggcctacaggttcaacggcatcggcgtgacccagaacgtgctgtacgagaaccagaagctgatcgccaaccagttcaacagcgccatcggcaagatccaggacagcctgagcagcacccccagcgccctgggcaagctgcaggacgtggtgaaccacaacgcccaggccctgaacaccctggtgaagcagctgagcagcaagttcggcgccatcagcagcgtgctgaacgacatcctgagcaggctggacccccccgaggccgaggtgcagatcgacaggctgatcaccggcaggctgcagagcctgcagacctacgtgacccagcagctgatcagggccgccgagatcagggccagcgccaacctggccgccaccaagatgagcgagtgcgtgctgggccagagcaagagggtggacttctgcggcaagggctaccacctgatgagcttcccccagagcgccccccacggcgtggtgttcctgcacgtgacctacgtgcccgcccaggagaagaacttcaccaccgcccccgccatctgccacgacggcaaggcccacttccccagggagggcgtgttcgtgagcaacggcacccactggttcgtgacccagaggaacttctacgagccccagatcatcaccaccgacaacaccttcgtgagcggcaactgcgacgtggtgatcggcatcgtgaacaacaccgtgtacgaccccctgcagcccgagctggacagcttcaaggaggagctggacaagtacttcaagaaccacaccagccccgacgtggacctgggcgacatcagcggcatcaacgccagcgtggtgaacatccagaaggagatcgacaggctgaacgaggtggccaagaacctgaacgagagcctgatcgacctgcaggagctgggcaagtacgagcagtacatcaagtggccctggtacatctggctgggcttcatcgccggcctgatcgccatcgtgatggtgaccatcatgctgtgctgcatgaccagctgctgcagctgcctgaagggctgctgcagctgcggcagctgctgcaagttcgacgaggacgacagcgagcccgtgctgaagggcgtgaagctgcactacacctgatga

SEQ ID NO: 383 - DNA, 3810 bp, synthetic construct
  source 1..3810: mol_type = other DNA; note = Spike Protein codon optimized
atgtttgtattcctggtactgctgcccctggtcagtagtcagtgtgtcaatctgatcactcgcacgcaaagttataccaattccttcactcgcggtgtctactacccagacaaggtgtttaggtccagcgtgctccacagcacacaagacttgttcttaccatttttcagtaatgttacctggtttcatgccatctccggcacaaatgggaccaagaggttcgacaatcctgtgctacccttcaacgacggggtgtactttgcttccactgagaaatctaatatcattagaggctggatctttggtaccacattagattctaaaactcagtcactgctaattgtgaataacgccacgaacgtcgtgatcaaggtctgtgagtttcaattctgcaacgaccctttcctggatgtctattatcacaagaacaataagagctggatggagtctgagttccgagtgtacagttctgcaaacaattgcacctttgagtacgtaagtcagccttttctcatggatctggaaggcaagcagggtaatttcaagaatctgcgggaattcgtgttcaagaacattgacggatatttcaaaatatattcaaagcatacaccgattaacttggggcgggatctgccacaagggtttagtgccctggagcccttggtggacttgcccattggcatcaacattacccgttttcagacccttctggcattgcacaggtcttatctcacacctggggattccagcagtggctggacagccggtgcagctgcctactacgtgggctaccttcagccacgtacattcctcctaaaatataacgaaaacgggaccattactgatgcagtcgactgtgcactggacccactgtccgagactaaatgcacattaaagagcttcactgtggaaaaggggatttaccagacgtccaacttcagggttcagcccaccgaaagcatcgtccgcttcccaaatatcaccaacctgtgtccctttgatgaggtgttcaacgccacacgttttgctagcgtctatgcctggaaccggaaaagaatctcgaactgtgtggcagactactcagtgctctacaactttgctccttttttcgccttcaaatgttacggcgtttcacctacgaaactgaatgacctctgctttaccaatgtctatgctgattcatttgtgatccgcggcaatgaggtcagtcaaatagcacccgggcagactgggaacatagccgattacaattacaaactaccggatgacttcacaggctgcgttattgcatggaattcgaataagttggactcaaaggttggaggaaattataactaccggtacagactgttccgtaagtctaatctgaagcccttcgaacgggacatttccacagagatctaccaggctggaaacaagccatgcaatggcgtggcaggtgtgaactgctacttccctctgcgctcgtatgggtttagacccacgtatggagtgggacatcagccttatagagttgtggtgttaagctttgaactgcttcatgccccagccaccgtgtgtgggccaaagaagtctactaaccttgttaaaaacaagtgtgtgaattttaattttaatggactgaccggaactggcgtcctgactgagagcaacaagaaatttctccccttccagcagtttggaagggatattgctgacacaaccgatgcggtccgcgacccgcagacgcttgaaattctggacatcaccccctgctctttcggtggtgtgtctgtcatcacgcctggcactaacacatccaaccaagtggctgtcctctatcagggagttaactgtaccgaggttcctgtggccatccacgcggaccagctgactccaacatggcgcgtttacagcactggctcaaacgtattccagactcgggccggttgtttaattggtgccgaatatgttaacaacagttacgaatgtgatatccccattggcgcgggaatctgtgcgagctaccaaacacagactaagtcccaccagcaggcccagagtgtggctagccagagcatcattgcatacaccatgtccctcggcgctgaaaatagtgttgcttattcgaataattccattgcaattcctactaacttcaccataagcgtcacgacagaaatcctgcctgtgtctatgacaaaaacatccgtcgactgcacgatgtacatctgcggcgacagcacagagtgctcaaacctccttctgcagtacggatctttctgtacacaactcaagagggctctgacagggatcgcagtggaacaagataagaatacacaggaagttttcgcgcaggtgaaacagatctacaagaccccccctattaagtatttcggcgggttcaactttagccagattttgccagatccgagcaaacctagtaaacgatcccctattgaggacctgctctttaacaaagtgacattggcagatgctggatttatcaaacagtacggagactgcctgggagacatcgcagctcgggatcttatctgtgcacagaagttcaatggtcttacagtgcttcctccacttctgacagacgagatgatcgctcagtatacaagtgctctccttgcgggcacaataactagcggatggacgtttggggctggacctgcgctacagatcccatttccaatgcagatggcctacagattcaacgggataggtgttactcagaatgtcctctatgagaaccagaaattaattgccaaccagttcaactccgcaatcgggaagatccaggattcactctccagcaccccttctgcccttggtaaattacaagatgtggttaatcataacgcccaagccctcaatacactagtgaagcaactcagtagtaagtttggagcaatatcatctgtgctaaatgatatcttgtctcggttggacccacctgaggcagaagtgcagatagacaggctcatcactgggaggttacaatcacttcagacctatgtcactcaacagctcatccgagctgccgagattagagctagcgccaacctcgctgccaccaaaatgtctgaatgtgtgttggggcagtctaaacgagttgacttttgtggcaagggctaccacctgatgagctttccccagtcagcaccacatggggtagtttttttgcatgtcacctacgtacccgcccaggagaagaatttcacgaccgctcccgctatatgccatgacggcaaggcccactttccaagagagggagtgttcgttagcaacggaacccactggttcgtaactcagagaaacttctacgaaccacagatcatcactaccgataacaccttcgtgtctggaaactgtgacgtggtgattggtatagtcaacaacacagtatatgatcccctccaaccggagctcgattcatttaaggaggagctggacaagtactttaaaaatcacacttcgccggacgtcgaccttggtgatatttcagggatcaatgcctccgtagtaaacatacagaaggaaattgaccgattgaatgaggtagcgaaaaacctgaatgagtccctgatagatctccaggagcttggcaaatatgaacagtatattaagtggccgtggtacatctggctgggcttcatcgccggcctgatagccattgtgatggtgacaatcatgctgtgctgcatgacctcttgctgcagctgcctgaagggctgctgtagttgtgggtcctgttgcaagtttgatgaggatgatagcgagccagtcctgaaaggagtgaagctgcactatacttgataa

SEQ ID NO: 384 - DNA, 119 bp, unidentified
  source 1..119: mol_type = genomic DNA; note = Influenza
ttcggagctattgctggtttcttggaaggaggatgggaaggaatgattgcaggttggcacggatacacatctcatggagcacatggagtagcagtggcagcagaccttaagagtaccca

SEQ ID NO: 385 - protein, 40 aa, unidentified
  source 1..40: note = Influenza
FGAIAGFLEGGWEGMIAGWHGYTSHGAHGVAVAADLKSTX

SEQ ID NO: 386 - DNA, 1701 bp, unidentified
  source 1..1701: mol_type = genomic DNA; note = Influenza
atgaaggcaatactagtagttctgctatatacatttgcaaccgcaaatgcagacacattatgtataggttatcatgcgaacaactcaacagacactgtagacacagtactagaaaagaatgtaacagtaacacactctgttaaccttctagaagacaagcataacgggaaactatgcaaactaagaggggtagccccattgcatttgggtaaatgtaacattgctggctggatcctgggaaatccagagtgtgaatcactctccacagcaagctcatggtcctacattgtggaaacatctagttcagacaatggaacgtgttacccaggagatttcatcgattatgaggagctaagagagcaattgagctcagtgtcatcatttgaaaggtttgagatattccccaagacaagttcatggcccaatcatgactcgaacaaaggtgtaacgacagcatgtcctcatgctggagcaaaaagcttctacaaaaatttaatatggctagttaaaaaaggaaattcatacccaaagctcagcaaatcctacattaatgataaagggaaagaagtcctcgtgctatggggcattcaccatccacctactagtgctgaccaacaaagtctctatcagaatgcagatgcatatgtttttgtggggacatcaagatacagcaagaagttcaagccggaaatagcaataaggcccaaagtgagggatcaagaagggagaatgaactattactggacactagtagagccgggagacaaaataacattcgaagcaactggaaatctagtggtaccgagatatgcattcgcaatggaaagaaatgctggatctggtattatcatttcagatacaccagtccacgattgcaatacaacttgtcagacacccaagggtgctataaacaccagcctcccatttcagaacatacatccgatcacaattggaaaatgtccaaaatatgtaaaaagcacaaaattgagactggccacaggattgaggaatgtcccgtccattcaatctagaggcctatttggggccattgccggtttcattgaaggggggtggacagggatggtagatggatggtacggttatcaccatcaaaatgagcaggggtcaggatatgcagccgacctgaagagcacacagaatgccattgacgagattactaacaaagtaaactctgttattgaaaaaatgaatacacagttcacagcagtaggtaaagagttcaaccacctggaaaaaagaatagagaatttaaataaaaaagttgatgatggtttcctggacatttggacttacaatgccgaactgttggttctattggaaaatgaaagaactttggactaccacgattcaaaggtgaagaacttatatgaaaaggtaagaagccagttaaaaaacaatgccaaggaaattggaaacggctgctttgaattttaccacaaatgtgataacacgtgcatggaaagtgtcaaaaatgggacttatgactacccaaaatactcagaggaagcaaaattaaacagagaagaaatagatggggtaaagctggaatcaacaaggatttaccagattttggcgatctattcaaccgtcgccagttcattggtactggtagtctccctgggggcaatcagtttctggatgtgctctaatgggtctctacagtgtagaatatgtatttaa

SEQ ID NO: 387 - DNA, 1762 bp, unidentified
  source 1..1762: mol_type = genomic DNA; note = Influenza
agcaaaagcaggggataattctattaaccatgaagactatcattgctttgagctacattctatgtctggttttcgctcaaaaacttcctggaaatgacaatagcactgcaacgctgtgccttgggcaccatgcagtaccaaacggaacgatagtgaaaacaatcacgaatgaccaaattgaagttactaatgctactgagctggttcagaattcctcaataggtgaaatatgcgacagtcctcatcagatccttgatggagaaaactgcacactaatagatgctctattgggagaccctcagtgtgatggctttcaaaataagaaatgggacctttttgttgaacgaagcaaagcctacagcaactgttacccttatgatgtgccggattatgcctcccttaggtcactagttgcctcatccggcacactggagtttaacaatgaaagcttcaattgggctggagtcactcaaaacggaacaagttctgcttgcataaggggatctaatagtagtttctttagtagattaaattggttgacccacttaaacttcaagtacccagcattgaacgtgactatgccaaacaatgaacaatttgacaaattgtacatttggggggttcaccacccgggtacggacaaggaccaaatcttcctgtatgctcaatcatcaggaagaatcacagtatctaccaaaagaagccaacaagctgtaatcccgaatatcggatctagacccagaataaggaatatccctagcagaataagcatctattggacaatagtaaaaccgggagacatacttttgattaacagcacagggaatctaattgctcctaggggttacttcaaaatacgaagtgggaaaagctcaataatgagatcagatgcacccattggcaaatgcaagtctgaatgcatcactccaaatggaagcattcccaatgacaaaccattccaaaatgtaaacaggatcacatacggggcctgtcccagatatgttaagcaaagcactctgaaattggcaacaggaatgcgaaatgtaccagagaaacaaactagaggcatatttggcgcaatagcgggtttcatagaaaatggttgggagggaatggtggatggttggtacggtttcaggcatcaaaattctgagggaagaggacaagcagcagatctcaaaagcactcaagcagcaatcgatcaaatcaatgggaagctgaatcgattgatcgggaaaaccaacgagaaattccatcagattgagaaagaattctcagaagtagaagggagaattcaggaccttgagaaatatgttgaggacacaaaaatagatctctggtcatacaacgcagagcttcttgttgccctggaaaaccaacatacaattgatctaactgactcagaaatgaacaaactgtttgaaaaaacaaagaagcaactgagggaaaatgctgaggatatgggcaatggttgtttcaaaatataccacaaatgtgacaatgcctgcataggatcaatcagaaatggaacttatgaccacgatgtatacagggatgaagcattaaacaaccggttccagatcaagggagttgagctgaagtcagggtacaaagattggatcctatggatttcctttgccatatcatgttttttgctttgtgttgctttgttggggttcatcatgtgggcctgccaaaagggcaacattaggtgcaacatttgcatttgagtgcattaattaaaaacacccttgtttctact

SEQ ID NO: 388 - DNA, 1847 bp, unidentified
  source 1..1847: mol_type = genomic DNA; note = Influenza
attttctaatatccacaaaatgaaggcaataattgtactactcatggtagtaacatccaatgcagatcgaatctgcactgggataacatcgtcaaactcaccacatgtcgtcaaaactgctactcaaggggaggtcaacgtgaccggtgtaataccactgacaacaacacccaccaaatctcattttgcaaatctcaaaggaacagaaaccagggggaaactatgcccaaaatgcctcaactgcacagatctggatgtagccttgggcagaccaaaatgcacagggaaaataccctctgcaagggtttcaatactccatgaagtcagacctgttacatctgggtgctttcctataatgcacgatagaacaaaaattagacagctgcctaaccttctccgaggatacgaacatgtcaggttatcaactcacaacgttatcaatgcaaaagatgcaccaggaagaccctacgaaattggaacctcagggtcttgccctaacattaccaatggaaacggattcttcgcaacaatggcttgggccgtcccaaaaaacaaaacagcaacaaatccattaacaatagaagtaccatacatttgtacagaaggagaagaccaaattaccgtttgggggttccactctgacaacgagacccaaatggcaaagctctatggggactcaaagccccagaagttcacctcatctgccaacggagtgaccacacattacgtttcacagattggtggcttcccaaatcaaacagaagacggaggactaccacaaagtggcagaattgttgttgattacatggtgcagaaatctggaaaaacaggaacaattacctatcaaagaggtattttattgcctcaaaaagtgtggtgcgcaagtggcaggagcaaggtaataaaaggatccttgcccttaattggagaagcagattgcctccatgaaaaatacggtggattaaacaaaagcaagccttactacacaggggaacatgcaaaggccataggaaattgcccaatatgggtgaaaacacccttgaagctggccaatggaaccaaatatagaccccctgcaaaactattaaaggaaagaggtttcttcggagccattgctggtttcttagagggaggatgggaaggaatgattgcaggttggcacggatacacatcccatggggcacatggagtagcggtggcagctgaccttaagagcactcaagaggccataaacaagataacaaaaaatctcaactctttgagtgagctggaagtaaagaatcttcaaagactaagcggtgccatggatgaactccacaacgaaatactagaactagatgagaaagtggatgatctcagagctgacacaataagctcacaaatagaactcgcagtcctgctttccaatgaaggaataataaacagtgaagatgaacatctcttggcgcttgaaagaaagctgaagaaaatgctgggcccctctgctgtagagatagggaatggatgctttgaaaccaaacacaagtgcaaccagacctgcctcgacagaatagctgctggtacctttgatgcaggagaattttctctccccacctttgattcactgaatattactgctgcatctttaaatgacgacggattggacaatcatactatactgctttactactcaactgctgcctccagtttggctgtaacactgatgatagctatctttgttgtttatatggtctccagagacaatgtttcttgctccatttgtctataaggaaagttaagccctgtattttcctttattgtagtgcttgtttgcttgttgtcattacaaagaaacgttattgaaaaat

SEQ ID NO: 389 - DNA, 4956 bp, synthetic construct
  source 1..4956: mol_type = other DNA; note = Hybrid Vaccine Candidate 1
tagttattaatagtaatcaattacggggtcattagttcatagcccatatatggagttccgcgttacataacttacggtaaatggcccgcctggctgaccgcccaacgacccccgcccattgacgtcaataatgacgtatgttcccatagtaacgccaatagggactttccattgacgtcaatgggtggagtatttacggtaaactgcccacttggcagtacatcaagtgtatcatatgccaagtacgccccctattgacgtcaatgacggtaaatggcccgcctggcattatgcccagtacatgaccttatgggactttcctacttggcagtacatctacgtattagtcatcgctattaccatggtgatgcggttttggcagtacatcaatgggcgtggatagcggtttgactcacggggatttccaagtctccaccccattgacgtcaatgggagtttgttttggcaccaaaatcaacgggactttccaaaatgtcgtaacaactccgccccattgacgcaaatgggcggtaggcgtgtacggtgggaggtctatataagcagagctggtttagtgaaccgtcagatcgagaataaactagtattcttctggtccccacagactcagagagaacccgccaccatgttcgtgttcctggtgctgctgcccctggtgagcagccagtgcgtgaacctgaccaccaggacccagctgccccccgcctacaccaacagcttcaccaggggcgtgtactaccccgacaaggtgttcaggagcagcgtgctgcacagcacccaggacctgttcctgcccttcttcagcaacgtgacctggttccacgccatccacgtgagcggcaccaacggcaccaagaggttcgacaaccccgtgctgcccttcaacgacggcgtgtacttcgccagcaccgagaagagcaacatcatcaggggctggatcttcggcaccaccctggacagcaagacccagagcctgctgatcgtgaacaacgccaccaacgtggtgatcaaggtgtgcgagttccagttctgcaacgaccccttcctgggcgtgtactaccacaagaacaacaagagctggatggagagcgagttcagggtgtacagcagcgccaacaactgcaccttcgagtacgtgagccagcccttcctgatggacctggagggcaagcagggcaacttcaagaacctgagggagttcgtgttcaagaacatcgacggctacttcaagatctacagcaagcacacccccatcaacctggtgagggacctgccccagggcttcagcgccctggagcccctggtggacctgcccatcggcatcaacatcaccaggttccagaccctgctggccctgcacaggagctacctgacccccggcgacagcagcagcggctggaccgccggcgccgccgcctactacgtgggctacctgcagcccaggaccttcctgctgaagtacaacgagaacggcaccatcaccgacgccgtggactgcgccctggaccccctgagcgagaccaagtgcaccctgaagagcttcaccgtggagaagggcatctaccagaccagcaacttcagggtgcagcccaccgagagcatcgtgaggttccccaacatcaccaacctgtgccccttcggcgaggtgttcaacgccaccaggttcgccagcgtgtacgcctggaacaggaagaggatcagcaactgcgtggccgactacagcgtgctgtacaacagcgccagcttcagcaccttcaagtgctacggcgtgagccccaccaagctgaacgacctgtgcttcaccaacgtgtacgccgacagcttcgtgatcaggggcgacgaggtgaggcagatcgcccccggccagaccggcaagatcgccgactacaactacaagctgcccgacgacttcaccggctgcgtgatcgcctggaacagcaacaacctggacagcaaggtgggcggcaactacaactacctgtacaggctgttcaggaagagcaacctgaagcccttcgagagggacatcagcaccgagatctaccaggccggcagcaccccctgcaacggcgtggagggcttcaactgctacttccccctgcagagctacggcttccagcccaccaacggcgtgggctaccagccctacagggtggtggtgctgagcttcgagctgctgcacgcccccgccaccgtgtgcggccccaagaagagcaccaacctggtgaagaacaagtgcgtgaacttcaacttcaacggcctgaccggcaccggcgtgctgaccgagagcaacaagaagttcctgcccttccagcagttcggcagggacatcgccgacaccaccgacgccgtgagggacccccagaccctggagatcctggacatcaccccctgcagcttcggcggcgtgagcgtgatcacccccggcaccaacaccagcaaccaggtggccgtgctgtaccaggacgtgaactgcaccgaggtgcccgtggccatccacgccgaccagctgacccccacctggagggtgtacagcaccggcagcaacgtgttccagaccagggccggctgcctgatcggcgccgagcacgtgaacaacagctacgagtgcgacatccccatcggcgccggcatctgcgccagctaccagacccagaccaacagccccggcagcgccagcagcgtggccagccagagcatcatcgcctacaccatgagcctgggcgccgagaacagcgtggcctacagcaacaacagcatcgccatccccaccaacttcaccatcagcgtgaccaccgagatcctgcccgtgagcatgaccaagaccagcgtggactgcaccatgtacatctgcggcgacagcaccgagtgcagcaacctgctgctgcagtacggcagcttctgcacccagctgaacagggccctgaccggcatcgccgtggagcaggacaagaacacccaggaggtgttcgcccaggtgaagcagatctacaagaccccccccatcaaggacttcggcggcttcaacttcagccagatcctgcccgaccccagcaagcccagcaagaggagccccatcgaggacctgctgttcaacaaggtgaccctggccgacgccggcttcatcaagcagtacggcgactgcctgggcgacatcgccgccagggacctgatctgcgcccagaagttcaacggcctgaccgtgctgccccccctgctgaccgacgagatgatcgcccagtacaccagcgccctgctggccggcaccatcaccagcggctggaccttcggcgccggccccgccctgcagatccccttccccatgcagatggcctacaggttcaacggcatcggcgtgacccagaacgtgctgtacgagaaccagaagctgatcgccaaccagttcaacagcgccatcggcaagatccaggacagcctgagcagcacccccagcgccctgggcaagctgcaggacgtggtgaaccagaacgcccaggccctgaacaccctggtgaagcagctgagcagcaacttcggcgccatcagcagcgtgctgaacgacatcctgagcaggctggacccccccgaggccgaggtgcagatcgacaggctgatcaccggcaggctgcagagcctgcagacctacgtgacccagcagctgatcagggccgccgagatcagggccagcgccaacctggccgccaccaagatgagcgagtgcgtgctgggccagagcaagagggtggacttctgcggcaagggctaccacctgatgagcttcccccagagcgccccccacggcgtggtgttcctgcacgtgacctacgtgcccgcccaggagaagaacttcaccaccgcccccgccatctgccacgacggcaaggcccacttccccagggagggcgtgttcgtgagcaacggcacccactggttcgtgacccagaggaacttctacgagccccagatcatcaccaccgacaacaccttcgtgagcggcaactgcgacgtggtgatcggcatcgtgaacaacaccgtgtacgaccccctgcagcccgagctggacagcttcaaggaggagctggacaagtacttcaagaaccacaccagccccgacgtggacctgggcgacatcagcggcatcaacgccagcgtggtgaacatccagaaggagatcgacaggctgaacgaggtggccaagaacctgaacgagagcctgatcgacctgcaggagctgggcaagtacgagcagtacatcaagtggccctggtacatctggctgggcttcatcgccggcctgatcgccatcgtgatggtgaccatcatgctgtgctgcatgaccagctgctgcagctgcctgaagggctgctgcagctgcggcagctgctgcaagttcgacgaggacgacagcgagcccgtgctgaagggcgtgaagctgcactacaccggaagcggagccacgaacttctctctgttaaagcaagcaggagatgttgaagaaaaccccgggcctttcggagctattgctggtttcttggaaggaggatgggaaggaatgattgcaggttggcacggatacacatctcatggagcacatggagtagcagtggcagcagaccttaagagtacccatgatgactcgagctggtactgcatgcacgcaatgctagctgcccctttcccgtcctgggtaccccgagtctcccccgacctcgggtcccaggtatgctcccacctccacctgccccactcaccacctctgctagttccagacacctcccaagcacgcagcaatgcagctcaaaacgcttagcctagccacacccccacgggaaacagcagtgattaacctttagcaataaacgaaagtttaactaagctatactaaccccagggttggtcaatttcgtgccagccacaccctggagctagcaaaaaaaa

SEQ ID NO: 390 - DNA, 4957 bp, synthetic construct
  source 1..4957: mol_type = other DNA; note = Hybrid Vaccine Candidate2
tagttattaatagtaatcaattacggggtcattagttcatagcccatatatggagttccgcgttacataacttacggtaaatggcccgcctggctgaccgcccaacgacccccgcccattgacgtcaataatgacgtatgttcccatagtaacgccaatagggactttccattgacgtcaatgggtggagtatttacggtaaactgcccacttggcagtacatcaagtgtatcatatgccaagtacgccccctattgacgtcaatgacggtaaatggcccgcctggcattatgcccagtacatgaccttatgggactttcctacttggcagtacatctacgtattagtcatcgctattaccatggtgatgcggttttggcagtacatcaatgggcgtggatagcggtttgactcacggggatttccaagtctccaccccattgacgtcaatgggagtttgttttggcaccaaaatcaacgggactttccaaaatgtcgtaacaactccgccccattgacgcaaatgggcggtaggcgtgtacggtgggaggtctatataagcagagctggtttagtgaaccgtcagatcgagaataaactagtattcttcctggtccccacagactcagagagaacccgccaccatgttcgtgttcctggtgctgctgcccctggtgagcagccagtgcgtgaacctgaccaccaggacccagctgccccccgcctacaccaacagcttcaccaggggcgtgtactaccccgacaaggtgttcaggagcagcgtgctgcacagcacccaggacctgttcctgcccttcttcagcaacgtgacctggttccacgccatccacgtgagcggcaccaacggcaccaagaggttcgacaaccccgtgctgcccttcaacgacggcgtgtacttcgccagcaccgagaagagcaacatcatcaggggctggatcttcggcaccaccctggacagcaagacccagagcctgctgatcgtgaacaacgccaccaacgtggtgatcaaggtgtgcgagttccagttctgcaacgaccccttcctgggcgtgtactaccacaagaacaacaagagctggatggagagcgagttcagggtgtacagcagcgccaacaactgcaccttcgagtacgtgagccagcccttcctgatggacctggagggcaagcagggcaacttcaagaacctgagggagttcgtgttcaagaacatcgacggctacttcaagatctacagcaagcacacccccatcaacctggtgagggacctgccccagggcttcagcgccctggagcccctggtggacctgcccatcggcatcaacatcaccaggttccagaccctgctggccctgcacaggagctacctgacccccggcgacagcagcagcggctggaccgccggcgccgccgcctactacgtgggctacctgcagcccaggaccttcctgctgaagtacaacgagaacggcaccatcaccgacgccgtggactgcgccctggaccccctgagcgagaccaagtgcaccctgaagagcttcaccgtggagaagggcatctaccagaccagcaacttcagggtgcagcccaccgagagcatcgtgaggttccccaacatcaccaacctgtgccccttcggcgaggtgttcaacgccaccaggttcgccagcgtgtacgcctggaacaggaagaggatcagcaactgcgtggccgactacagcgtgctgtacaacagcgccagcttcagcaccttcaagtgctacggcgtgagccccaccaagctgaacgacctgtgcttcaccaacgtgtacgccgacagcttcgtgatcaggggcgacgaggtgaggcagatcgcccccggccagaccggcaagatcgccgactacaactacaagctgcccgacgacttcaccggctgcgtgatcgcctggaacagcaacaacctggacagcaaggtgggcggcaactacaactacctgtacaggctgttcaggaagagcaacctgaagcccttcgagagggacatcagcaccgagatctaccaggccggcagcaccccctgcaacggcgtggagggcttcaactgctacttccccctgcagagctacggcttccagcccaccaacggcgtgggctaccagccctacagggtggtggtgctgagcttcgagctgctgcacgcccccgccaccgtgtgcggccccaagaagagcaccaacctggtgaagaacaagtgcgtgaacttcaacttcaacggcctgaccggcaccggcgtgctgaccgagagcaacaagaagttcctgcccttccagcagttcggcagggacatcgccgacaccaccgacgccgtgagggacccccagaccctggagatcctggacatcaccccctgcagcttcggcggcgtgagcgtgatcacccccggcaccaacaccagcaaccaggtggccgtgctgtaccaggacgtgaactgcaccgaggtgcccgtggccatccacgccgaccagctgacccccacctggagggtgtacagcaccggcagcaacgtgttccagaccagggccggctgcctgatcggcgccgagcacgtgaacaacagctacgagtgcgacatccccatcggcgccggcatctgcgccagctaccagacccagaccaacagccccaggagggccaggagcgtggccagccagagcatcatcgcctacaccatgagcctgggcgccgagaacagcgtggcctacagcaacaacagcatcgccatccccaccaacttcaccatcagcgtgaccaccgagatcctgcccgtgagcatgaccaagaccagcgtggactgcaccatgtacatctgcggcgacagcaccgagtgcagcaacctgctgctgcagtacggcagcttctgcacccagctgaacagggccctgaccggcatcgccgtggagcaggacaagaacacccaggaggtgttcgcccaggtgaagcagatctacaagaccccccccatcaaggacttcggcggcttcaacttcagccagatcctgcccgaccccagcaagcccagcaagaggagcttcatcgaggacctgctgttcaacaaggtgaccctggccgacgccggcttcatcaagcagtacggcgactgcctgggcgacatcgccgccagggacctgatctgcgcccagaagttcaacggcctgaccgtgctgccccccctgctgaccgacgagatgatcgcccagtacaccagcgccctgctggccggcaccatcaccagcggctggaccttcggcgccggcgccgccctgcagatccccttcgccatgcagatggcctacaggttcaacggcatcggcgtgacccagaacgtgctgtacgagaaccagaagctgatcgccaaccagttcaacagcgccatcggcaagatccaggacagcctgagcagcaccgccagcgccctgggcaagctgcaggacgtggtgaaccagaacgcccaggccctgaacaccctggtgaagcagctgagcagcaacttcggcgccatcagcagcgtgctgaacgacatcctgagcaggctggacccccccgaggccgaggtgcagatcgacaggctgatcaccggcaggctgcagagcctgcagacctacgtgacccagcagctgatcagggccgccgagatcagggccagcgccaacctggccgccaccaagatgagcgagtgcgtgctgggccagagcaagagggtggacttctgcggcaagggctaccacctgatgagcttcccccagagcgccccccacggcgtggtgttcctgcacgtgacctacgtgcccgcccaggagaagaacttcaccaccgcccccgccatctgccacgacggcaaggcccacttccccagggagggcgtgttcgtgagcaacggcacccactggttcgtgacccagaggaacttctacgagccccagatcatcaccaccgacaacaccttcgtgagcggcaactgcgacgtggtgatcggcatcgtgaacaacaccgtgtacgaccccctgcagcccgagctggacagcttcaaggaggagctggacaagtacttcaagaaccacaccagccccgacgtggacctgggcgacatcagcggcatcaacgccagcgtggtgaacatccagaaggagatcgacaggctgaacgaggtggccaagaacctgaacgagagcctgatcgacctgcaggagctgggcaagtacgagcagtacatcaagtggccctggtacatctggctgggcttcatcgccggcctgatcgccatcgtgatggtgaccatcatgctgtgctgcatgaccagctgctgcagctgcctgaagggctgctgcagctgcggcagctgctgcaagttcgacgaggacgacagcgagcccgtgctgaagggcgtgaagctgcactacaccggaagcggagccacgaacttctctctgttaaagcaagcaggagatgttgaagaaaaccccgggcctttcggagctattgctggtttcttggaaggaggatgggaaggaatgattgcaggttggcacggatacacatctcatggagcacatggagtagcagtggcagcagaccttaagagtacccatgatgactcgagctggtactgcatgcacgcaatgctagctgcccctttcccgtcctgggtaccccgagtctcccccgacctcgggtcccaggtatgctcccacctccacctgccccactcaccacctctgctagttccagacacctcccaagcacgcagcaatgcagctcaaaacgcttagcctagccacacccccacgggaaacagcagtgattaacctttagcaataaacgaaagtttaactaagctatactaaccccagggttggtcaatttcgtgccagccacaccctggagctagcaaaaaaaa

SEQ ID NO: 391 - DNA, 6100 bp, synthetic construct
  source 1..6100: mol_type = other DNA; note = Hybrid Vaccine Candidate 3
ctcgacattgattattgactagttattaatagtaatcaattacggggtcattagttcatagcccatatatggagttccgcgttacataacttacggtaaatggcccgcctggctgaccgcccaacgacccccgcccattgacgtcaataatgacgtatgttcccatagtaacgccaatagggactttccattgacgtcaatgggtggagtatttacggtaaactgcccacttggcagtacatcaagtgtatcatatgccaagtacgccccctattgacgtcaatgacggtaaatggcccgcctggcattatgcccagtacatgaccttatgggactttcctacttggcagtacatctacgtattagtcatcgctattaccatggtcgaggtgagccccacgttctgcttcactctccccatctcccccccctccccacccccaattttgtatttatttattttttaattattttgtgcagcgatgggggcggggggggggggggggcgcgcgccaggcggggcggggcggggcgaggggcggggcggggcgaggcggagaggtgcggcggcagccaatcagagcggcgcgctccgaaagtttccttttatggcgaggcggcggcggcggcggccctataaaaagcgaagcgcgcggcgggcgggagtcgctgcgcgctgccttcgccccgtgccccgctccgccgccgcctcgcgccgcccgccccggctctgactgaccgcgttactcccacaggtgagcgggcgggacggcccttctcctccgggctgtaattagcgcttggtttaatgacggcttgtttcttttctgtggctgcgtgaaagccttgaggggctccgggagggccctttgtgcggggggagcggctcggggggtgcgtgcgtgtgtgtgtgcgtggggagcgccgcgtgcggctccgcgctgcccggcggctgtgagcgctgcgggcgcggcgcggggctttgtgcgctccgcagtgtgcgcgaggggagcgcggccgggggcggtgccccgcggtgcggggggggctgcgaggggaacaaaggctgcgtgcggggtgtgtgcgtgggggggtgagcagggggtgtgggcgcgtcggtcgggctgcaaccccccctgcacccccctccccgagttgctgagcacggcccggcttcgggtgcggggctccgtacggggcgtggcgcggggctcgccgtgccgggcggggggtggcggcaggtgggggtgccgggcggggcggggccgcctcgggccggggagggctcgggggaggggcgcggcggcccccggagcgccggcggctgtcgaggcgcggcgagccgcagccattgccttttatggtaatcgtgcgagagggcgcagggacttcctttgtcccaaatctgtgcggagccgaaatctgggaggcgccgccgcaccccctctagcgggcgcggggcgaagcggtgcggcgccggcaggaaggaaatgggcggggagggccttcgtgcgtcgccgcgccgccgtccccttctccctctccagcctcggggctgtccgcggggggacggctgccttcgggggggacggggcagggcggggttcggcttctggcgtgtgaccggcggctctagagcctctgctaaccatgttcatgccttcttctttttcctacagctcctgggcaacgtgctggttattgtgctgtctcatcattttggcaaagaattggagaataaactagtattcttctggtccccacagactcagagagaacccgccaccatgttcgtgttcctggtgctgctgcccctggtgagcagccagtgcgtgaacctgaccaccaggacccagctgccccccgcctacaccaacagcttcaccaggggcgtgtactaccccgacaaggtgttcaggagcagcgtgctgcacagcacccaggacctgttcctgcccttcttcagcaacgtgacctggttccacgccatccacgtgagcggcaccaacggcaccaagaggttcgacaaccccgtgctgcccttcaacgacggcgtgtacttcgccagcaccgagaagagcaacatcatcaggggctggatcttcggcaccaccctggacagcaagacccagagcctgctgatcgtgaacaacgccaccaacgtggtgatcaaggtgtgcgagttccagttctgcaacgaccccttcctgggcgtgtactaccacaagaacaacaagagctggatggagagcgagttcagggtgtacagcagcgccaacaactgcaccttcgagtacgtgagccagcccttcctgatggacctggagggcaagcagggcaacttcaagaacctgagggagttcgtgttcaagaacatcgacggctacttcaagatctacagcaagcacacccccatcaacctggtgagggacctgccccagggcttcagcgccctggagcccctggtggacctgcccatcggcatcaacatcaccaggttccagaccctgctggccctgcacaggagctacctgacccccggcgacagcagcagcggctggaccgccggcgccgccgcctactacgtgggctacctgcagcccaggaccttcctgctgaagtacaacgagaacggcaccatcaccgacgccgtggactgcgccctggaccccctgagcgagaccaagtgcaccctgaagagcttcaccgtggagaagggcatctaccagaccagcaacttcagggtgcagcccaccgagagcatcgtgaggttccccaacatcaccaacctgtgccccttcggcgaggtgttcaacgccaccaggttcgccagcgtgtacgcctggaacaggaagaggatcagcaactgcgtggccgactacagcgtgctgtacaacagcgccagcttcagcaccttcaagtgctacggcgtgagccccaccaagctgaacgacctgtgcttcaccaacgtgtacgccgacagcttcgtgatcaggggcgacgaggtgaggcagatcgcccccggccagaccggcaagatcgccgactacaactacaagctgcccgacgacttcaccggctgcgtgatcgcctggaacagcaacaacctggacagcaaggtgggcggcaactacaactacctgtacaggctgttcaggaagagcaacctgaagcccttcgagagggacatcagcaccgagatctaccaggccggcagcaccccctgcaacggcgtggagggcttcaactgctacttccccctgcagagctacggcttccagcccaccaacggcgtgggctaccagccctacagggtggtggtgctgagcttcgagctgctgcacgcccccgccaccgtgtgcggccccaagaagagcaccaacctggtgaagaacaagtgcgtgaacttcaacttcaacggcctgaccggcaccggcgtgctgaccgagagcaacaagaagttcctgcccttccagcagttcggcagggacatcgccgacaccaccgacgccgtgagggacccccagaccctggagatcctggacatcaccccctgcagcttcggcggcgtgagcgtgatcacccccggcaccaacaccagcaaccaggtggccgtgctgtaccaggacgtgaactgcaccgaggtgcccgtggccatccacgccgaccagctgacccccacctggagggtgtacagcaccggcagcaacgtgttccagaccagggccggctgcctgatcggcgccgagcacgtgaacaacagctacgagtgcgacatccccatcggcgccggcatctgcgccagctaccagacccagaccaacagccccggcagcgccagcagcgtggccagccagagcatcatcgcctacaccatgagcctgggcgccgagaacagcgtggcctacagcaacaacagcatcgccatccccaccaacttcaccatcagcgtgaccaccgagatcctgcccgtgagcatgaccaagaccagcgtggactgcaccatgtacatctgcggcgacagcaccgagtgcagcaacctgctgctgcagtacggcagcttctgcacccagctgaacagggccctgaccggcatcgccgtggagcaggacaagaacacccaggaggtgttcgcccaggtgaagcagatctacaagaccccccccatcaaggacttcggcggcttcaacttcagccagatcctgcccgaccccagcaagcccagcaagaggagccccatcgaggacctgctgttcaacaaggtgaccctggccgacgccggcttcatcaagcagtacggcgactgcctgggcgacatcgccgccagggacctgatctgcgcccagaagttcaacggcctgaccgtgctgccccccctgctgaccgacgagatgatcgcccagtacaccagcgccctgctggccggcaccatcaccagcggctggaccttcggcgccggccccgccctgcagatccccttccccatgcagatggcctacaggttcaacggcatcggcgtgacccagaacgtgctgtacgagaaccagaagctgatcgccaaccagttcaacagcgccatcggcaagatccaggacagcctgagcagcacccccagcgccctgggcaagctgcaggacgtggtgaaccagaacgcccaggccctgaacaccctggtgaagcagctgagcagcaacttcggcgccatcagcagcgtgctgaacgacatcctgagcaggctggacccccccgaggccgaggtgcagatcgacaggctgatcaccggcaggctgcagagcctgcagacctacgtgacccagcagctgatcagggccgccgagatcagggccagcgccaacctggccgccaccaagatgagcgagtgcgtgctgggccagagcaagagggtggacttctgcggcaagggctaccacctgatgagcttcccccagagcgccccccacggcgtggtgttcctgcacgtgacctacgtgcccgcccaggagaagaacttcaccaccgcccccgccatctgccacgacggcaaggcccacttccccagggagggcgtgttcgtgagcaacggcacccactggttcgtgacccagaggaacttctacgagccccagatcatcaccaccgacaacaccttcgtgagcggcaactgcgacgtggtgatcggcatcgtgaacaacaccgtgtacgaccccctgcagcccgagctggacagcttcaaggaggagctggacaagtacttcaagaaccacaccagccccgacgtggacctgggcgacatcagcggcatcaacgccagcgtggtgaacatccagaaggagatcgacaggctgaacgaggtggccaagaacctgaacgagagcctgatcgacctgcaggagctgggcaagtacgagcagtacatcaagtggccctggtacatctggctgggcttcatcgccggcctgatcgccatcgtgatggtgaccatcatgctgtgctgcatgaccagctgctgcagctgcctgaagggctgctgcagctgcggcagctgctgcaagttcgacgaggacgacagcgagcccgtgctgaagggcgtgaagctgcactacaccggaagcggagccacgaacttctctctgttaaagcaagcaggagatgttgaagaaaaccccgggcctttcggagctattgctggtttcttggaaggaggatgggaaggaatgattgcaggttggcacggatacacatctcatggagcacatggagtagcagtggcagcagaccttaagagtacccatgatgactcgagctggtactgcatgcacgcaatgctagctgcccctttcccgtcctgggtaccccgagtctcccccgacctcgggtcccaggtatgctcccacctccacctgccccactcaccacctctgctagttccagacacctcccaagcacgcagcaatgcagctcaaaacgcttagcctagccacacccccacgggaaacagcagtgattaacctttagcaataaacgaaagtttaactaagctatactaaccccagggttggtcaatttcgtgccagccacaccctggagctagcaaaaaaaa

SEQ ID NO: 392 - DNA, 6100 bp, synthetic construct
  source 1..6100: mol_type = other DNA; note = Hybrid Vaccine Candidate 4
ctcgacattgattattgactagttattaatagtaatcaattacggggtcattagttcatagcccatatatggagttccgcgttacataacttacggtaaatggcccgcctggctgaccgcccaacgacccccgcccattgacgtcaataatgacgtatgttcccatagtaacgccaatagggactttccattgacgtcaatgggtggagtatttacggtaaactgcccacttggcagtacatcaagtgtatcatatgccaagtacgccccctattgacgtcaatgacggtaaatggcccgcctggcattatgcccagtacatgaccttatgggactttcctacttggcagtacatctacgtattagtcatcgctattaccatggtcgaggtgagccccacgttctgcttcactctccccatctcccccccctccccacccccaattttgtatttatttattttttaattattttgtgcagcgatgggggcggggggggggggggggcgcgcgccaggcggggcggggcggggcgaggggcggggcggggcgaggcggagaggtgcggcggcagccaatcagagcggcgcgctccgaaagtttccttttatggcgaggcggcggcggcggcggccctataaaaagcgaagcgcgcggcgggcgggagtcgctgcgcgctgccttcgccccgtgccccgctccgccgccgcctcgcgccgcccgccccggctctgactgaccgcgttactcccacaggtgagcgggcgggacggcccttctcctccgggctgtaattagcgcttggtttaatgacggcttgtttcttttctgtggctgcgtgaaagccttgaggggctccgggagggccctttgtgcggggggagcggctcggggggtgcgtgcgtgtgtgtgtgcgtggggagcgccgcgtgcggctccgcgctgcccggcggctgtgagcgctgcgggcgcggcgcggggctttgtgcgctccgcagtgtgcgcgaggggagcgcggccgggggcggtgccccgcggtgcggggggggctgcgaggggaacaaaggctgcgtgcggggtgtgtgcgtgggggggtgagcagggggtgtgggcgcgtcggtcgggctgcaaccccccctgcacccccctccccgagttgctgagcacggcccggcttcgggtgcggggctccgtacggggcgtggcgcggggctcgccgtgccgggcggggggtggcggcaggtgggggtgccgggcggggcggggccgcctcgggccggggagggctcgggggaggggcgcggcggcccccggagcgccggcggctgtcgaggcgcggcgagccgcagccattgccttttatggtaatcgtgcgagagggcgcagggacttcctttgtcccaaatctgtgcggagccgaaatctgggaggcgccgccgcaccccctctagcgggcgcggggcgaagcggtgcggcgccggcaggaaggaaatgggcggggagggccttcgtgcgtcgccgcgccgccgtccccttctccctctccagcctcggggctgtccgcggggggacggctgccttcgggggggacggggcagggcggggttcggcttctggcgtgtgaccggcggctctagagcctctgctaaccatgttcatgccttcttctttttcctacagctcctgggcaacgtgctggttattgtgctgtctcatcattttggcaaagaattggagaataaactagtattcttctggtccccacagactcagagagaacccgccaccatgttcgtgttcctggtgctgctgcccctggtgagcagccagtgcgtgaacctgaccaccaggacccagctgccccccgcctacaccaacagcttcaccaggggcgtgtactaccccgacaaggtgttcaggagcagcgtgctgcacagcacccaggacctgttcctgcccttcttcagcaacgtgacctggttccacgccatccacgtgagcggcaccaacggcaccaagaggttcgacaaccccgtgctgcccttcaacgacggcgtgtacttcgccagcaccgagaagagcaacatcatcaggggctggatcttcggcaccaccctggacagcaagacccagagcctgctgatcgtgaacaacgccaccaacgtggtgatcaaggtgtgcgagttccagttctgcaacgaccccttcctgggcgtgtactaccacaagaacaacaagagctggatggagagcgagttcagggtgtacagcagcgccaacaactgcaccttcgagtacgtgagccagcccttcctgatggacctggagggcaagcagggcaacttcaagaacctgagggagttcgtgttcaagaacatcgacggctacttcaagatctacagcaagcacacccccatcaacctggtgagggacctgccccagggcttcagcgccctggagcccctggtggacctgcccatcggcatcaacatcaccaggttccagaccctgctggccctgcacaggagctacctgacccccggcgacagcagcagcggctggaccgccggcgccgccgcctactacgtgggctacctgcagcccaggaccttcctgctgaagtacaacgagaacggcaccatcaccgacgccgtggactgcgccctggaccccctgagcgagaccaagtgcaccctgaagagcttcaccgtggagaagggcatctaccagaccagcaacttcagggtgcagcccaccgagagcatcgtgaggttccccaacatcaccaacctgtgccccttcggcgaggtgttcaacgccaccaggttcgccagcgtgtacgcctggaacaggaagaggatcagcaactgcgtggccgactacagcgtgctgtacaacagcgccagcttcagcaccttcaagtgctacggcgtgagccccaccaagctgaacgacctgtgcttcaccaacgtgtacgccgacagcttcgtgatcaggggcgacgaggtgaggcagatcgcccccggccagaccggcaagatcgccgactacaactacaagctgcccgacgacttcaccggctgcgtgatcgcctggaacagcaacaacctggacagcaaggtgggcggcaactacaactacctgtacaggctgttcaggaagagcaacctgaagcccttcgagagggacatcagcaccgagatctaccaggccggcagcaccccctgcaacggcgtggagggcttcaactgctacttccccctgcagagctacggcttccagcccaccaacggcgtgggctaccagccctacagggtggtggtgctgagcttcgagctgctgcacgcccccgccaccgtgtgcggccccaagaagagcaccaacctggtgaagaacaagtgcgtgaacttcaacttcaacggcctgaccggcaccggcgtgctgaccgagagcaacaagaagttcctgcccttccagcagttcggcagggacatcgccgacaccaccgacgccgtgagggacccccagaccctggagatcctggacatcaccccctgcagcttcggcggcgtgagcgtgatcacccccggcaccaacaccagcaaccaggtggccgtgctgtaccaggacgtgaactgcaccgaggtgcccgtggccatccacgccgaccagctgacccccacctggagggtgtacagcaccggcagcaacgtgttccagaccagggccggctgcctgatcggcgccgagcacgtgaacaacagctacgagtgcgacatccccatcggcgccggcatctgcgccagctaccagacccagaccaacagccccaggagggccaggagcgtggccagccagagcatcatcgcctacaccatgagcctgggcgccgagaacagcgtggcctacagcaacaacagcatcgccatccccaccaacttcaccatcagcgtgaccaccgagatcctgcccgtgagcatgaccaagaccagcgtggactgcaccatgtacatctgcggcgacagcaccgagtgcagcaacctgctgctgcagtacggcagcttctgcacccagctgaacagggccctgaccggcatcgccgtggagcaggacaagaacacccaggaggtgttcgcccaggtgaagcagatctacaagaccccccccatcaaggacttcggcggcttcaacttcagccagatcctgcccgaccccagcaagcccagcaagaggagcttcatcgaggacctgctgttcaacaaggtgaccctggccgacgccggcttcatcaagcagtacggcgactgcctgggcgacatcgccgccagggacctgatctgcgcccagaagttcaacggcctgaccgtgctgccccccctgctgaccgacgagatgatcgcccagtacaccagcgccctgctggccggcaccatcaccagcggctggaccttcggcgccggcgccgccctgcagatccccttcgccatgcagatggcctacaggttcaacggcatcggcgtgacccagaacgtgctgtacgagaaccagaagctgatcgccaaccagttcaacagcgccatcggcaagatccaggacagcctgagcagcaccgccagcgccctgggcaagctgcaggacgtggtgaaccagaacgcccaggccctgaacaccctggtgaagcagctgagcagcaacttcggcgccatcagcagcgtgctgaacgacatcctgagcaggctggacccccccgaggccgaggtgcagatcgacaggctgatcaccggcaggctgcagagcctgcagacctacgtgacccagcagctgatcagggccgccgagatcagggccagcgccaacctggccgccaccaagatgagcgagtgcgtgctgggccagagcaagagggtggacttctgcggcaagggctaccacctgatgagcttcccccagagcgccccccacggcgtggtgttcctgcacgtgacctacgtgcccgcccaggagaagaacttcaccaccgcccccgccatctgccacgacggcaaggcccacttccccagggagggcgtgttcgtgagcaacggcacccactggttcgtgacccagaggaacttctacgagccccagatcatcaccaccgacaacaccttcgtgagcggcaactgcgacgtggtgatcggcatcgtgaacaacaccgtgtacgaccccctgcagcccgagctggacagcttcaaggaggagctggacaagtacttcaagaaccacaccagccccgacgtggacctgggcgacatcagcggcatcaacgccagcgtggtgaacatccagaaggagatcgacaggctgaacgaggtggccaagaacctgaacgagagcctgatcgacctgcaggagctgggcaagtacgagcagtacatcaagtggccctggtacatctggctgggcttcatcgccggcctgatcgccatcgtgatggtgaccatcatgctgtgctgcatgaccagctgctgcagctgcctgaagggctgctgcagctgcggcagctgctgcaagttcgacgaggacgacagcgagcccgtgctgaagggcgtgaagctgcactacaccggaagcggagccacgaacttctctctgttaaagcaagcaggagatgttgaagaaaaccccgggcctttcggagctattgctggtttcttggaaggaggatgggaaggaatgattgcaggttggcacggatacacatctcatggagcacatggagtagcagtggcagcagaccttaagagtacccatgatgactcgagctggtactgcatgcacgcaatgctagctgcccctttcccgtcctgggtaccccgagtctcccccgacctcgggtcccaggtatgctcccacctccacctgccccactcaccacctctgctagttccagacacctcccaagcacgcagcaatgcagctcaaaacgcttagcctagccacacccccacgggaaacagcagtgattaacctttagcaataaacgaaagtttaactaagctatactaaccccagggttggtcaatttcgtgccagccacaccctggagctagcaaaaaaaa

SEQ ID NO: 393 - DNA, 4010 bp, synthetic construct
  source 1..4010: mol_type = other DNA; note = Hybrid Vaccine Candidate 5
atgttcgtgttcctggtgctgctgcccctggtgagcagccagtgcgtgaacctgaccaccaggacccagctgccccccgcctacaccaacagcttcaccaggggcgtgtactaccccgacaaggtgttcaggagcagcgtgctgcacagcacccaggacctgttcctgcccttcttcagcaacgtgacctggttccacgccatccacgtgagcggcaccaacggcaccaagaggttcgacaaccccgtgctgcccttcaacgacggcgtgtacttcgccagcaccgagaagagcaacatcatcaggggctggatcttcggcaccaccctggacagcaagacccagagcctgctgatcgtgaacaacgccaccaacgtggtgatcaaggtgtgcgagttccagttctgcaacgaccccttcctgggcgtgtactaccacaagaacaacaagagctggatggagagcgagttcagggtgtacagcagcgccaacaactgcaccttcgagtacgtgagccagcccttcctgatggacctggagggcaagcagggcaacttcaagaacctgagggagttcgtgttcaagaacatcgacggctacttcaagatctacagcaagcacacccccatcaacctggtgagggacctgccccagggcttcagcgccctggagcccctggtggacctgcccatcggcatcaacatcaccaggttccagaccctgctggccctgcacaggagctacctgacccccggcgacagcagcagcggctggaccgccggcgccgccgcctactacgtgggctacctgcagcccaggaccttcctgctgaagtacaacgagaacggcaccatcaccgacgccgtggactgcgccctggaccccctgagcgagaccaagtgcaccctgaagagcttcaccgtggagaagggcatctaccagaccagcaacttcagggtgcagcccaccgagagcatcgtgaggttccccaacatcaccaacctgtgccccttcggcgaggtgttcaacgccaccaggttcgccagcgtgtacgcctggaacaggaagaggatcagcaactgcgtggccgactacagcgtgctgtacaacagcgccagcttcagcaccttcaagtgctacggcgtgagccccaccaagctgaacgacctgtgcttcaccaacgtgtacgccgacagcttcgtgatcaggggcgacgaggtgaggcagatcgcccccggccagaccggcaagatcgccgactacaactacaagctgcccgacgacttcaccggctgcgtgatcgcctggaacagcaacaacctggacagcaaggtgggcggcaactacaactacctgtacaggctgttcaggaagagcaacctgaagcccttcgagagggacatcagcaccgagatctaccaggccggcagcaccccctgcaacggcgtggagggcttcaactgctacttccccctgcagagctacggcttccagcccaccaacggcgtgggctaccagccctacagggtggtggtgctgagcttcgagctgctgcacgcccccgccaccgtgtgcggccccaagaagagcaccaacctggtgaagaacaagtgcgtgaacttcaacttcaacggcctgaccggcaccggcgtgctgaccgagagcaacaagaagttcctgcccttccagcagttcggcagggacatcgccgacaccaccgacgccgtgagggacccccagaccctggagatcctggacatcaccccctgcagcttcggcggcgtgagcgtgatcacccccggcaccaacaccagcaaccaggtggccgtgctgtaccaggacgtgaactgcaccgaggtgcccgtggccatccacgccgaccagctgacccccacctggagggtgtacagcaccggcagcaacgtgttccagaccagggccggctgcctgatcggcgccgagcacgtgaacaacagctacgagtgcgacatccccatcggcgccggcatctgcgccagctaccagacccagaccaacagccccggcagcgccagcagcgtggccagccagagcatcatcgcctacaccatgagcctgggcgccgagaacagcgtggcctacagcaacaacagcatcgccatccccaccaacttcaccatcagcgtgaccaccgagatcctgcccgtgagcatgaccaagaccagcgtggactgcaccatgtacatctgcggcgacagcaccgagtgcagcaacctgctgctgcagtacggcagcttctgcacccagctgaacagggccctgaccggcatcgccgtggagcaggacaagaacacccaggaggtgttcgcccaggtgaagcagatctacaagaccccccccatcaaggacttcggcggcttcaacttcagccagatcctgcccgaccccagcaagcccagcaagaggagccccatcgaggacctgctgttcaacaaggtgaccctggccgacgccggcttcatcaagcagtacggcgactgcctgggcgacatcgccgccagggacctgatctgcgcccagaagttcaacggcctgaccgtgctgccccccctgctgaccgacgagatgatcgcccagtacaccagcgccctgctggccggcaccatcaccagcggctggaccttcggcgccggccccgccctgcagatccccttccccatgcagatggcctacaggttcaacggcatcggcgtgacccagaacgtgctgtacgagaaccagaagctgatcgccaaccagttcaacagcgccatcggcaagatccaggacagcctgagcagcacccccagcgccctgggcaagctgcaggacgtggtgaaccagaacgcccaggccctgaacaccctggtgaagcagctgagcagcaacttcggcgccatcagcagcgtgctgaacgacatcctgagcaggctggacccccccgaggccgaggtgcagatcgacaggctgatcaccggcaggctgcagagcctgcagacctacgtgacccagcagctgatcagggccgccgagatcagggccagcgccaacctggccgccaccaagatgagcgagtgcgtgctgggccagagcaagagggtggacttctgcggcaagggctaccacctgatgagcttcccccagagcgccccccacggcgtggtgttcctgcacgtgacctacgtgcccgcccaggagaagaacttcaccaccgcccccgccatctgccacgacggcaaggcccacttccccagggagggcgtgttcgtgagcaacggcacccactggttcgtgacccagaggaacttctacgagccccagatcatcaccaccgacaacaccttcgtgagcggcaactgcgacgtggtgatcggcatcgtgaacaacaccgtgtacgaccccctgcagcccgagctggacagcttcaaggaggagctggacaagtacttcaagaaccacaccagccccgacgtggacctgggcgacatcagcggcatcaacgccagcgtggtgaacatccagaaggagatcgacaggctgaacgaggtggccaagaacctgaacgagagcctgatcgacctgcaggagctgggcaagtacgagcagtacatcaagtggccctggtacatctggctgggcttcatcgccggcctgatcgccatcgtgatggtgaccatcatgctgtgctgcatgaccagctgctgcagctgcctgaagggctgctgcagctgcggcagctgctgcaagttcgacgaggacgacagcgagcccgtgctgaagggcgtgaagctgcactacaccggaagcggagccacgaacttctctctgttaaagcaagcaggagatgttgaagaaaaccccgggcctttcggagctattgctggtttcttggaaggaggatgggaaggaatgattgcaggttggcacggatacacatctcatggagcacatggagtagcagtggcagcagaccttaagagtacccatgatga

SEQ ID NO: 394 - DNA, 4010 bp, synthetic construct
  source 1..4010: mol_type = other DNA; note = Hybrid Vaccine Candidate 6
atgttcgtgttcctggtgctgctgcccctggtgagcagccagtgcgtgaacctgaccaccaggacccagctgccccccgcctacaccaacagcttcaccaggggcgtgtactaccccgacaaggtgttcaggagcagcgtgctgcacagcacccaggacctgttcctgcccttcttcagcaacgtgacctggttccacgccatccacgtgagcggcaccaacggcaccaagaggttcgacaaccccgtgctgcccttcaacgacggcgtgtacttcgccagcaccgagaagagcaacatcatcaggggctggatcttcggcaccaccctggacagcaagacccagagcctgctgatcgtgaacaacgccaccaacgtggtgatcaaggtgtgcgagttccagttctgcaacgaccccttcctgggcgtgtactaccacaagaacaacaagagctggatggagagcgagttcagggtgtacagcagcgccaacaactgcaccttcgagtacgtgagccagcccttcctgatggacctggagggcaagcagggcaacttcaagaacctgagggagttcgtgttcaagaacatcgacggctacttcaagatctacagcaagcacacccccatcaacctggtgagggacctgccccagggcttcagcgccctggagcccctggtggacctgcccatcggcatcaacatcaccaggttccagaccctgctggccctgcacaggagctacctgacccccggcgacagcagcagcggctggaccgccggcgccgccgcctactacgtgggctacctgcagcccaggaccttcctgctgaagtacaacgagaacggcaccatcaccgacgccgtggactgcgccctggaccccctgagcgagaccaagtgcaccctgaagagcttcaccgtggagaagggcatctaccagaccagcaacttcagggtgcagcccaccgagagcatcgtgaggttccccaacatcaccaacctgtgccccttcggcgaggtgttcaacgccaccaggttcgccagcgtgtacgcctggaacaggaagaggatcagcaactgcgtggccgactacagcgtgctgtacaacagcgccagcttcagcaccttcaagtgctacggcgtgagccccaccaagctgaacgacctgtgcttcaccaacgtgtacgccgacagcttcgtgatcaggggcgacgaggtgaggcagatcgcccccggccagaccggcaagatcgccgactacaactacaagctgcccgacgacttcaccggctgcgtgatcgcctggaacagcaacaacctggacagcaaggtgggcggcaactacaactacctgtacaggctgttcaggaagagcaacctgaagcccttcgagagggacatcagcaccgagatctaccaggccggcagcaccccctgcaacggcgtggagggcttcaactgctacttccccctgcagagctacggcttccagcccaccaacggcgtgggctaccagccctacagggtggtggtgctgagcttcgagctgctgcacgcccccgccaccgtgtgcggccccaagaagagcaccaacctggtgaagaacaagtgcgtgaacttcaacttcaacggcctgaccggcaccggcgtgctgaccgagagcaacaagaagttcctgcccttccagcagttcggcagggacatcgccgacaccaccgacgccgtgagggacccccagaccctggagatcctggacatcaccccctgcagcttcggcggcgtgagcgtgatcacccccggcaccaacaccagcaaccaggtggccgtgctgtaccaggacgtgaactgcaccgaggtgcccgtggccatccacgccgaccagctgacccccacctggagggtgtacagcaccggcagcaacgtgttccagaccagggccggctgcctgatcggcgccgagcacgtgaacaacagctacgagtgcgacatccccatcggcgccggcatctgcgccagctaccagacccagaccaacagccccaggagggccaggagcgtggccagccagagcatcatcgcctacaccatgagcctgggcgccgagaacagcgtggcctacagcaacaacagcatcgccatccccaccaacttcaccatcagcgtgaccaccgagatcctgcccgtgagcatgaccaagaccagcgtggactgcaccatgtacatctgcggcgacagcaccgagtgcagcaacctgctgctgcagtacggcagcttctgcacccagctgaacagggccctgaccggcatcgccgtggagcaggacaagaacacccaggaggtgttcgcccaggtgaagcagatctacaagaccccccccatcaaggacttcggcggcttcaacttcagccagatcctgcccgaccccagcaagcccagcaagaggagcttcatcgaggacctgctgttcaacaaggtgaccctggccgacgccggcttcatcaagcagtacggcgactgcctgggcgacatcgccgccagggacctgatctgcgcccagaagttcaacggcctgaccgtgctgccccccctgctgaccgacgagatgatcgcccagtacaccagcgccctgctggccggcaccatcaccagcggctggaccttcggcgccggcgccgccctgcagatccccttcgccatgcagatggcctacaggttcaacggcatcggcgtgacccagaacgtgctgtacgagaaccagaagctgatcgccaaccagttcaacagcgccatcggcaagatccaggacagcctgagcagcaccgccagcgccctgggcaagctgcaggacgtggtgaaccagaacgcccaggccctgaacaccctggtgaagcagctgagcagcaacttcggcgccatcagcagcgtgctgaacgacatcctgagcaggctggacccccccgaggccgaggtgcagatcgacaggctgatcaccggcaggctgcagagcctgcagacctacgtgacccagcagctgatcagggccgccgagatcagggccagcgccaacctggccgccaccaagatgagcgagtgcgtgctgggccagagcaagagggtggacttctgcggcaagggctaccacctgatgagcttcccccagagcgccccccacggcgtggtgttcctgcacgtgacctacgtgcccgcccaggagaagaacttcaccaccgcccccgccatctgccacgacggcaaggcccacttccccagggagggcgtgttcgtgagcaacggcacccactggttcgtgacccagaggaacttctacgagccccagatcatcaccaccgacaacaccttcgtgagcggcaactgcgacgtggtgatcggcatcgtgaacaacaccgtgtacgaccccctgcagcccgagctggacagcttcaaggaggagctggacaagtacttcaagaaccacaccagccccgacgtggacctgggcgacatcagcggcatcaacgccagcgtggtgaacatccagaaggagatcgacaggctgaacgaggtggccaagaacctgaacgagagcctgatcgacctgcaggagctgggcaagtacgagcagtacatcaagtggccctggtacatctggctgggcttcatcgccggcctgatcgccatcgtgatggtgaccatcatgctgtgctgcatgaccagctgctgcagctgcctgaagggctgctgcagctgcggcagctgctgcaagttcgacgaggacgacagcgagcccgtgctgaagggcgtgaagctgcactacaccggaagcggagccacgaacttctctctgttaaagcaagcaggagatgttgaagaaaaccccgggcctttcggagctattgctggtttcttggaaggaggatgggaaggaatgattgcaggttggcacggatacacatctcatggagcacatggagtagcagtggcagcagaccttaagagtacccatgatga

SEQ ID NO: 395 - DNA, 8688 bp, synthetic construct
  source 1..8688: mol_type = other DNA; note = Hybrid Vaccine Candidate 7
tagttattaatagtaatcaattacggggtcattagttcatagcccatatatggagttccgcgttacataacttacggtaaatggcccgcctggctgaccgcccaacgacccccgcccattgacgtcaataatgacgtatgttcccatagtaacgccaatagggactttccattgacgtcaatgggtggagtatttacggtaaactgcccacttggcagtacatcaagtgtatcatatgccaagtacgccccctattgacgtcaatgacggtaaatggcccgcctggcattatgcccagtacatgaccttatgggactttcctacttggcagtacatctacgtattagtcatcgctattaccatggtgatgcggttttggcagtacatcaatgggcgtggatagcggtttgactcacggggatttccaagtctccaccccattgacgtcaatgggagtttgttttggcaccaaaatcaacgggactttccaaaatgtcgtaacaactccgccccattgacgcaaatgggcggtaggcgtgtacggtgggaggtctatataagcagagctggtttagtgaaccgtcagatcgagaataaactagtattcttctggtccccacagactcagagagaacccgccaccatgttcgtgttcctggtgctgctgcccctggtgagcagccagtgcgtgaacctgatcaccaggacccagagctacaccaacagcttcaccaggggcgtgtactaccccgacaaggtgttcaggagcagcgtgctgcacagcacccaggacctgttcctgcccttcttcagcaacgtgacctggttccacgccatccacgtgagcggcaccaacggcaccaagaggttcgacaaccccgtgctgcccttcaacgacggcgtgtacttcgccagcaccgagaagagcaacatcatcaggggctggatcttcggcaccaccctggacagcaagacccagagcctgctgatcgtgaacaacgccaccaacgtggtgatcaaggtgtgcgagttccagttctgcaacgaccccttcctggacgtgtactaccacaagaacaacaagagctggatggagagcgagttcagggtgtacagcagcgccaacaactgcaccttcgagtacgtgagccagcccttcctgatggacctggagggcaagcagggcaacttcaagaacctgagggagttcgtgttcaagaacatcgacggctacttcaagatctacagcaagcacacccccatcaacctgggcagggacctgccccagggcttcagcgccctggagcccctggtggacctgcccatcggcatcaacatcaccaggttccagaccctgctggccctgcacaggagctacctgacccccggcgacagcagcagcggctggaccgccggcgccgccgcctactacgtgggctacctgcagcccaggaccttcctgctgaagtacaacgagaacggcaccatcaccgacgccgtggactgcgccctggaccccctgagcgagaccaagtgcaccctgaagagcttcaccgtggagaagggcatctaccagaccagcaacttcagggtgcagcccaccgagagcatcgtgaggttccccaacatcaccaacctgtgccccttcgacgaggtgttcaacgccaccaggttcgccagcgtgtacgcctggaacaggaagaggatcagcaactgcgtggccgactacagcgtgctgtacaacttcgcccccttcttcgccttcaagtgctacggcgtgagccccaccaagctgaacgacctgtgcttcaccaacgtgtacgccgacagcttcgtgatcaggggcaacgaggtgagccagatcgcccccggccagaccggcaacatcgccgactacaactacaagctgcccgacgacttcaccggctgcgtgatcgcctggaacagcaacaagctggacagcaaggtgggcggcaactacaactacctgtacaggctgttcaggaagagcaacctgaagcccttcgagagggacatcagcaccgagatctaccaggccggcaacaagccctgcaacggcgtggccggcttcaactgctacttccccctgaggagctacggcttcaggcccacctacggcgtgggccaccagccctacagggtggtggtgctgagcttcgagctgctgcacgcccccgccaccgtgtgcggccccaagaagagcaccaacctggtgaagaacaagtgcgtgaacttcaacttcaacggcctgaccggcaccggcgtgctgaccgagagcaacaagaagttcctgcccttccagcagttcggcagggacatcgccgacaccaccgacgccgtgagggacccccagaccctggagatcctggacatcaccccctgcagcttcggcggcgtgagcgtgatcacccccggcaccaacaccagcaaccaggtggccgtgctgtaccagggcgtgaactgcaccgaggtgcccgtggccatccacgccgaccagctgacccccacctggagggtgtacagcaccggcagcaacgtgttccagaccagggccggctgcctgatcggcgccgagtacgtgaacaacagctacgagtgcgacatccccatcggcgccggcatctgcgccagctaccagacccagaccaagagccaccagcaggcccagagcgtggccagccagagcatcatcgcctacaccatgagcctgggcgccgagaacagcgtggcctacagcaacaacagcatcgccatccccaccaacttcaccatcagcgtgaccaccgagatcctgcccgtgagcatgaccaagaccagcgtggactgcaccatgtacatctgcggcgacagcaccgagtgcagcaacctgctgctgcagtacggcagcttctgcacccagctgaagagggccctgaccggcatcgccgtggagcaggacaagaacacccaggaggtgttcgcccaggtgaagcagatctacaagaccccccccatcaagtacttcggcggcttcaacttcagccagatcctgcccgaccccagcaagcccagcaagaggagccccatcgaggacctgctgttcaacaaggtgaccctggccgacgccggcttcatcaagcagtacggcgactgcctgggcgacatcgccgccagggacctgatctgcgcccagaagttcaacggcctgaccgtgctgccccccctgctgaccgacgagatgatcgcccagtacaccagcgccctgctggccggcaccatcaccagcggctggaccttcggcgccggccccgccctgcagatccccttccccatgcagatggcctacaggttcaacggcatcggcgtgacccagaacgtgctgtacgagaaccagaagctgatcgccaaccagttcaacagcgccatcggcaagatccaggacagcctgagcagcacccccagcgccctgggcaagctgcaggacgtggtgaaccacaacgcccaggccctgaacaccctggtgaagcagctgagcagcaagttcggcgccatcagcagcgtgctgaacgacatcctgagcaggctggacccccccgaggccgaggtgcagatcgacaggctgatcaccggcaggctgcagagcctgcagacctacgtgacccagcagctgatcagggccgccgagatcagggccagcgccaacctggccgccaccaagatgagcgagtgcgtgctgggccagagcaagagggtggacttctgcggcaagggctaccacctgatgagcttcccccagagcgccccccacggcgtggtgttcctgcacgtgacctacgtgcccgcccaggagaagaacttcaccaccgcccccgccatctgccacgacggcaaggcccacttccccagggagggcgtgttcgtgagcaacggcacccactggttcgtgacccagaggaacttctacgagccccagatcatcaccaccgacaacaccttcgtgagcggcaactgcgacgtggtgatcggcatcgtgaacaacaccgtgtacgaccccctgcagcccgagctggacagcttcaaggaggagctggacaagtacttcaagaaccacaccagccccgacgtggacctgggcgacatcagcggcatcaacgccagcgtggtgaacatccagaaggagatcgacaggctgaacgaggtggccaagaacctgaacgagagcctgatcgacctgcaggagctgggcaagtacgagcagtacatcaagtggccctggtacatctggctgggcttcatcgccggcctgatcgccatcgtgatggtgaccatcatgctgtgctgcatgaccagctgctgcagctgcctgaagggctgctgcagctgcggcagctgctgcaagttcgacgaggacgacagcgagcccgtgctgaagggcgtgaagctgcactacaccggaagcggagccacgaacttctctctgttaaagcaagcaggagatgttgaagaaaaccccgggcctagcaaaagcaggggataattctattaaccatgaagactatcattgctttgagctacattctatgtctggttttcgctcaaaaacttcctggaaatgacaatagcactgcaacgctgtgccttgggcaccatgcagtaccaaacggaacgatagtgaaaacaatcacgaatgaccaaattgaagttactaatgctactgagctggttcagaattcctcaataggtgaaatatgcgacagtcctcatcagatccttgatggagaaaactgcacactaatagatgctctattgggagaccctcagtgtgatggctttcaaaataagaaatgggacctttttgttgaacgaagcaaagcctacagcaactgttacccttatgatgtgccggattatgcctcccttaggtcactagttgcctcatccggcacactggagtttaacaatgaaagcttcaattgggctggagtcactcaaaacggaacaagttctgcttgcataaggggatctaatagtagtttctttagtagattaaattggttgacccacttaaacttcaagtacccagcattgaacgtgactatgccaaacaatgaacaatttgacaaattgtacatttggggggttcaccacccgggtacggacaaggaccaaatcttcctgtatgctcaatcatcaggaagaatcacagtatctaccaaaagaagccaacaagctgtaatcccgaatatcggatctagacccagaataaggaatatccctagcagaataagcatctattggacaatagtaaaaccgggagacatacttttgattaacagcacagggaatctaattgctcctaggggttacttcaaaatacgaagtgggaaaagctcaataatgagatcagatgcacccattggcaaatgcaagtctgaatgcatcactccaaatggaagcattcccaatgacaaaccattccaaaatgtaaacaggatcacatacggggcctgtcccagatatgttaagcaaagcactctgaaattggcaacaggaatgcgaaatgtaccagagaaacaaactagaggcatatttggcgcaatagcgggtttcatagaaaatggttgggagggaatggtggatggttggtacggtttcaggcatcaaaattctgagggaagaggacaagcagcagatctcaaaagcactcaagcagcaatcgatcaaatcaatgggaagctgaatcgattgatcgggaaaaccaacgagaaattccatcagattgagaaagaattctcagaagtagaagggagaattcaggaccttgagaaatatgttgaggacacaaaaatagatctctggtcatacaacgcagagcttcttgttgccctggaaaaccaacatacaattgatctaactgactcagaaatgaacaaactgtttgaaaaaacaaagaagcaactgagggaaaatgctgaggatatgggcaatggttgtttcaaaatataccacaaatgtgacaatgcctgcataggatcaatcagaaatggaacttatgaccacgatgtatacagggatgaagcattaaacaaccggttccagatcaagggagttgagctgaagtcagggtacaaagattggatcctatggatttcctttgccatatcatgttttttgctttgtgttgctttgttggggttcatcatgtgggcctgccaaaagggcaacattaggtgcaacatttgcatttgagtgcattaattaaaaacacccttgtttctactggaagcggagccacgaacttctctctgttaaagcaagcaggagatgttgaagaaaaccccgggcctattttctaatatccacaaaatgaaggcaataattgtactactcatggtagtaacatccaatgcagatcgaatctgcactgggataacatcgtcaaactcaccacatgtcgtcaaaactgctactcaaggggaggtcaacgtgaccggtgtaataccactgacaacaacacccaccaaatctcattttgcaaatctcaaaggaacagaaaccagggggaaactatgcccaaaatgcctcaactgcacagatctggatgtagccttgggcagaccaaaatgcacagggaaaataccctctgcaagggtttcaatactccatgaagtcagacctgttacatctgggtgctttcctataatgcacgatagaacaaaaattagacagctgcctaaccttctccgaggatacgaacatgtcaggttatcaactcacaacgttatcaatgcaaaagatgcaccaggaagaccctacgaaattggaacctcagggtcttgccctaacattaccaatggaaacggattcttcgcaacaatggcttgggccgtcccaaaaaacaaaacagcaacaaatccattaacaatagaagtaccatacatttgtacagaaggagaagaccaaattaccgtttgggggttccactctgacaacgagacccaaatggcaaagctctatggggactcaaagccccagaagttcacctcatctgccaacggagtgaccacacattacgtttcacagattggtggcttcccaaatcaaacagaagacggaggactaccacaaagtggcagaattgttgttgattacatggtgcagaaatctggaaaaacaggaacaattacctatcaaagaggtattttattgcctcaaaaagtgtggtgcgcaagtggcaggagcaaggtaataaaaggatccttgcccttaattggagaagcagattgcctccatgaaaaatacggtggattaaacaaaagcaagccttactacacaggggaacatgcaaaggccataggaaattgcccaatatgggtgaaaacacccttgaagctggccaatggaaccaaatatagaccccctgcaaaactattaaaggaaagaggtttcttcggagccattgctggtttcttagagggaggatgggaaggaatgattgcaggttggcacggatacacatcccatggggcacatggagtagcggtggcagctgaccttaagagcactcaagaggccataaacaagataacaaaaaatctcaactctttgagtgagctggaagtaaagaatcttcaaagactaagcggtgccatggatgaactccacaacgaaatactagaactagatgagaaagtggatgatctcagagctgacacaataagctcacaaatagaactcgcagtcctgctttccaatgaaggaataataaacagtgaagatgaacatctcttggcgcttgaaagaaagctgaagaaaatgctgggcccctctgctgtagagatagggaatggatgctttgaaaccaaacacaagtgcaaccagacctgcctcgacagaatagctgctggtacctttgatgcaggagaattttctctccccacctttgattcactgaatattactgctgcatctttaaatgacgacggattggacaatcatactatactgctttactactcaactgctgcctccagtttggctgtaacactgatgatagctatctttgttgtttatatggtctccagagacaatgtttcttgctccatttgtctataaggaaagttaagccctgtattttcctttattgtagtgcttgtttgcttgttgtcattacaaagaaacgttattgaaaaatggaagcggagccacgaacttctctctgttaaagcaagcaggagatgttgaagaaaaccccgggcctttcggagctattgctggtttcttggaaggaggatgggaaggaatgattgcaggttggcacggatacacatctcatggagcacatggagtagcagtggcagcagaccttaagagtacccatgatgactcgagctggtactgcatgcacgcaatgctagctgcccctttcccgtcctgggtaccccgagtctcccccgacctcgggtcccaggtatgctcccacctccacctgccccactcaccacctctgctagttccagacacctcccaagcacgcagcaatgcagctcaaaacgcttagcctagccacacccccacgggaaacagcagtgattaacctttagcaataaacgaaagtttaactaagctatactaaccccagggttggtcaatttcgtgccagccacaccctggagctagcaaaaaaaa

SEQ ID NO: 396 - DNA, 10455 bp, synthetic construct
  source 1..10455: mol_type = other DNA; note = Hybrid Vaccine Candidate 8
tagttattaatagtaatcaattacggggtcattagttcatagcccatatatggagttccgcgttacataacttacggtaaatggcccgcctggctgaccgcccaacgacccccgcccattgacgtcaataatgacgtatgttcccatagtaacgccaatagggactttccattgacgtcaatgggtggagtatttacggtaaactgcccacttggcagtacatcaagtgtatcatatgccaagtacgccccctattgacgtcaatgacggtaaatggcccgcctggcattatgcccagtacatgaccttatgggactttcctacttggcagtacatctacgtattagtcatcgctattaccatggtgatgcggttttggcagtacatcaatgggcgtggatagcggtttgactcacggggatttccaagtctccaccccattgacgtcaatgggagtttgttttggcaccaaaatcaacgggactttccaaaatgtcgtaacaactccgccccattgacgcaaatgggcggtaggcgtgtacggtgggaggtctatataagcagagctggtttagtgaaccgtcagatcgagaataaactagtattcttctggtccccacagactcagagagaacccgccaccatgttcgtgttcctggtgctgctgcccctggtgagcagccagtgcgtgaacctgatcaccaggacccagagctacaccaacagcttcaccaggggcgtgtactaccccgacaaggtgttcaggagcagcgtgctgcacagcacccaggacctgttcctgcccttcttcagcaacgtgacctggttccacgccatccacgtgagcggcaccaacggcaccaagaggttcgacaaccccgtgctgcccttcaacgacggcgtgtacttcgccagcaccgagaagagcaacatcatcaggggctggatcttcggcaccaccctggacagcaagacccagagcctgctgatcgtgaacaacgccaccaacgtggtgatcaaggtgtgcgagttccagttctgcaacgaccccttcctggacgtgtactaccacaagaacaacaagagctggatggagagcgagttcagggtgtacagcagcgccaacaactgcaccttcgagtacgtgagccagcccttcctgatggacctggagggcaagcagggcaacttcaagaacctgagggagttcgtgttcaagaacatcgacggctacttcaagatctacagcaagcacacccccatcaacctgggcagggacctgccccagggcttcagcgccctggagcccctggtggacctgcccatcggcatcaacatcaccaggttccagaccctgctggccctgcacaggagctacctgacccccggcgacagcagcagcggctggaccgccggcgccgccgcctactacgtgggctacctgcagcccaggaccttcctgctgaagtacaacgagaacggcaccatcaccgacgccgtggactgcgccctggaccccctgagcgagaccaagtgcaccctgaagagcttcaccgtggagaagggcatctaccagaccagcaacttcagggtgcagcccaccgagagcatcgtgaggttccccaacatcaccaacctgtgccccttcgacgaggtgttcaacgccaccaggttcgccagcgtgtacgcctggaacaggaagaggatcagcaactgcgtggccgactacagcgtgctgtacaacttcgcccccttcttcgccttcaagtgctacggcgtgagccccaccaagctgaacgacctgtgcttcaccaacgtgtacgccgacagcttcgtgatcaggggcaacgaggtgagccagatcgcccccggccagaccggcaacatcgccgactacaactacaagctgcccgacgacttcaccggctgcgtgatcgcctggaacagcaacaagctggacagcaaggtgggcggcaactacaactacctgtacaggctgttcaggaagagcaacctgaagcccttcgagagggacatcagcaccgagatctaccaggccggcaacaagccctgcaacggcgtggccggcttcaactgctacttccccctgaggagctacggcttcaggcccacctacggcgtgggccaccagccctacagggtggtggtgctgagcttcgagctgctgcacgcccccgccaccgtgtgcggccccaagaagagcaccaacctggtgaagaacaagtgcgtgaacttcaacttcaacggcctgaccggcaccggcgtgctgaccgagagcaacaagaagttcctgcccttccagcagttcggcagggacatcgccgacaccaccgacgccgtgagggacccccagaccctggagatcctggacatcaccccctgcagcttcggcggcgtgagcgtgatcacccccggcaccaacaccagcaaccaggtggccgtgctgtaccagggcgtgaactgcaccgaggtgcccgtggccatccacgccgaccagctgacccccacctggagggtgtacagcaccggcagcaacgtgttccagaccagggccggctgcctgatcggcgccgagtacgtgaacaacagctacgagtgcgacatccccatcggcgccggcatctgcgccagctaccagacccagaccaagagccaccagcaggcccagagcgtggccagccagagcatcatcgcctacaccatgagcctgggcgccgagaacagcgtggcctacagcaacaacagcatcgccatccccaccaacttcaccatcagcgtgaccaccgagatcctgcccgtgagcatgaccaagaccagcgtggactgcaccatgtacatctgcggcgacagcaccgagtgcagcaacctgctgctgcagtacggcagcttctgcacccagctgaagagggccctgaccggcatcgccgtggagcaggacaagaacacccaggaggtgttcgcccaggtgaagcagatctacaagaccccccccatcaagtacttcggcggcttcaacttcagccagatcctgcccgaccccagcaagcccagcaagaggagcttcatcgaggacctgctgttcaacaaggtgaccctggccgacgccggcttcatcaagcagtacggcgactgcctgggcgacatcgccgccagggacctgatctgcgcccagaagttcaacggcctgaccgtgctgccccccctgctgaccgacgagatgatcgcccagtacaccagcgccctgctggccggcaccatcaccagcggctggaccttcggcgccggcgccgccctgcagatccccttcgccatgcagatggcctacaggttcaacggcatcggcgtgacccagaacgtgctgtacgagaaccagaagctgatcgccaaccagttcaacagcgccatcggcaagatccaggacagcctgagcagcaccgccagcgccctgggcaagctgcaggacgtggtgaaccacaacgcccaggccctgaacaccctggtgaagcagctgagcagcaagttcggcgccatcagcagcgtgctgaacgacatcctgagcaggctggacccccccgaggccgaggtgcagatcgacaggctgatcaccggcaggctgcagagcctgcagacctacgtgacccagcagctgatcagggccgccgagatcagggccagcgccaacctggccgccaccaagatgagcgagtgcgtgctgggccagagcaagagggtggacttctgcggcaagggctaccacctgatgagcttcccccagagcgccccccacggcgtggtgttcctgcacgtgacctacgtgcccgcccaggagaagaacttcaccaccgcccccgccatctgccacgacggcaaggcccacttccccagggagggcgtgttcgtgagcaacggcacccactggttcgtgacccagaggaacttctacgagccccagatcatcaccaccgacaacaccttcgtgagcggcaactgcgacgtggtgatcggcatcgtgaacaacaccgtgtacgaccccctgcagcccgagctggacagcttcaaggaggagctggacaagtacttcaagaaccacaccagccccgacgtggacctgggcgacatcagcggcatcaacgccagcgtggtgaacatccagaaggagatcgacaggctgaacgaggtggccaagaacctgaacgagagcctgatcgacctgcaggagctgggcaagtacgagcagtacatcaagtggccctggtacatctggctgggcttcatcgccggcctgatcgccatcgtgatggtgaccatcatgctgtgctgcatgaccagctgctgcagctgcctgaagggctgctgcagctgcggcagctgctgcaagttcgacgaggacgacagcgagcccgtgctgaagggcgtgaagctgcactacaccggaagcggagccacgaacttctctctgttaaagcaagcaggagatgttgaagaaaaccccgggcctatgaaggcaatactagtagttctgctatatacatttgcaaccgcaaatgcagacacattatgtataggttatcatgcgaacaactcaacagacactgtagacacagtactagaaaagaatgtaacagtaacacactctgttaaccttctagaagacaagcataacgggaaactatgcaaactaagaggggtagccccattgcatttgggtaaatgtaacattgctggctggatcctgggaaatccagagtgtgaatcactctccacagcaagctcatggtcctacattgtggaaacatctagttcagacaatggaacgtgttacccaggagatttcatcgattatgaggagctaagagagcaattgagctcagtgtcatcatttgaaaggtttgagatattccccaagacaagttcatggcccaatcatgactcgaacaaaggtgtaacgacagcatgtcctcatgctggagcaaaaagcttctacaaaaatttaatatggctagttaaaaaaggaaattcatacccaaagctcagcaaatcctacattaatgataaagggaaagaagtcctcgtgctatggggcattcaccatccacctactagtgctgaccaacaaagtctctatcagaatgcagatgcatatgtttttgtggggacatcaagatacagcaagaagttcaagccggaaatagcaataaggcccaaagtgagggatcaagaagggagaatgaactattactggacactagtagagccgggagacaaaataacattcgaagcaactggaaatctagtggtaccgagatatgcattcgcaatggaaagaaatgctggatctggtattatcatttcagatacaccagtccacgattgcaatacaacttgtcagacacccaagggtgctataaacaccagcctcccatttcagaacatacatccgatcacaattggaaaatgtccaaaatatgtaaaaagcacaaaattgagactggccacaggattgaggaatgtcccgtccattcaatctagaggcctatttggggccattgccggtttcattgaaggggggtggacagggatggtagatggatggtacggttatcaccatcaaaatgagcaggggtcaggatatgcagccgacctgaagagcacacagaatgccattgacgagattactaacaaagtaaactctgttattgaaaaaatgaatacacagttcacagcagtaggtaaagagttcaaccacctggaaaaaagaatagagaatttaaataaaaaagttgatgatggtttcctggacatttggacttacaatgccgaactgttggttctattggaaaatgaaagaactttggactaccacgattcaaaggtgaagaacttatatgaaaaggtaagaagccagttaaaaaacaatgccaaggaaattggaaacggctgctttgaattttaccacaaatgtgataacacgtgcatggaaagtgtcaaaaatgggacttatgactacccaaaatactcagaggaagcaaaattaaacagagaagaaatagatggggtaaagctggaatcaacaaggatttaccagattttggcgatctattcaaccgtcgccagttcattggtactggtagtctccctgggggcaatcagtttctggatgtgctctaatgggtctctacagtgtagaatatgtatttaaggaagcggagccacgaacttctctctgttaaagcaagcaggagatgttgaagaaaaccccgggcctagcaaaagcaggggataattctattaaccatgaagactatcattgctttgagctacattctatgtctggttttcgctcaaaaacttcctggaaatgacaatagcactgcaacgctgtgccttgggcaccatgcagtaccaaacggaacgatagtgaaaacaatcacgaatgaccaaattgaagttactaatgctactgagctggttcagaattcctcaataggtgaaatatgcgacagtcctcatcagatccttgatggagaaaactgcacactaatagatgctctattgggagaccctcagtgtgatggctttcaaaataagaaatgggacctttttgttgaacgaagcaaagcctacagcaactgttacccttatgatgtgccggattatgcctcccttaggtcactagttgcctcatccggcacactggagtttaacaatgaaagcttcaattgggctggagtcactcaaaacggaacaagttctgcttgcataaggggatctaatagtagtttctttagtagattaaattggttgacccacttaaacttcaagtacccagcattgaacgtgactatgccaaacaatgaacaatttgacaaattgtacatttggggggttcaccacccgggtacggacaaggaccaaatcttcctgtatgctcaatcatcaggaagaatcacagtatctaccaaaagaagccaacaagctgtaatcccgaatatcggatctagacccagaataaggaatatccctagcagaataagcatctattggacaatagtaaaaccgggagacatacttttgattaacagcacagggaatctaattgctcctaggggttacttcaaaatacgaagtgggaaaagctcaataatgagatcagatgcacccattggcaaatgcaagtctgaatgcatcactccaaatggaagcattcccaatgacaaaccattccaaaatgtaaacaggatcacatacggggcctgtcccagatatgttaagcaaagcactctgaaattggcaacaggaatgcgaaatgtaccagagaaacaaactagaggcatatttggcgcaatagcgggtttcatagaaaatggttgggagggaatggtggatggttggtacggtttcaggcatcaaaattctgagggaagaggacaagcagcagatctcaaaagcactcaagcagcaatcgatcaaatcaatgggaagctgaatcgattgatcgggaaaaccaacgagaaattccatcagattgagaaagaattctcagaagtagaagggagaattcaggaccttgagaaatatgttgaggacacaaaaatagatctctggtcatacaacgcagagcttcttgttgccctggaaaaccaacatacaattgatctaactgactcagaaatgaacaaactgtttgaaaaaacaaagaagcaactgagggaaaatgctgaggatatgggcaatggttgtttcaaaatataccacaaatgtgacaatgcctgcataggatcaatcagaaatggaacttatgaccacgatgtatacagggatgaagcattaaacaaccggttccagatcaagggagttgagctgaagtcagggtacaaagattggatcctatggatttcctttgccatatcatgttttttgctttgtgttgctttgttggggttcatcatgtgggcctgccaaaagggcaacattaggtgcaacatttgcatttgagtgcattaattaaaaacacccttgtttctactggaagcggagccacgaacttctctctgttaaagcaagcaggagatgttgaagaaaaccccgggcctattttctaatatccacaaaatgaaggcaataattgtactactcatggtagtaacatccaatgcagatcgaatctgcactgggataacatcgtcaaactcaccacatgtcgtcaaaactgctactcaaggggaggtcaacgtgaccggtgtaataccactgacaacaacacccaccaaatctcattttgcaaatctcaaaggaacagaaaccagggggaaactatgcccaaaatgcctcaactgcacagatctggatgtagccttgggcagaccaaaatgcacagggaaaataccctctgcaagggtttcaatactccatgaagtcagacctgttacatctgggtgctttcctataatgcacgatagaacaaaaattagacagctgcctaaccttctccgaggatacgaacatgtcaggttatcaactcacaacgttatcaatgcaaaagatgcaccaggaagaccctacgaaattggaacctcagggtcttgccctaacattaccaatggaaacggattcttcgcaacaatggcttgggccgtcccaaaaaacaaaacagcaacaaatccattaacaatagaagtaccatacatttgtacagaaggagaagaccaaattaccgtttgggggttccactctgacaacgagacccaaatggcaaagctctatggggactcaaagccccagaagttcacctcatctgccaacggagtgaccacacattacgtttcacagattggtggcttcccaaatcaaacagaagacggaggactaccacaaagtggcagaattgttgttgattacatggtgcagaaatctggaaaaacaggaacaattacctatcaaagaggtattttattgcctcaaaaagtgtggtgcgcaagtggcaggagcaaggtaataaaaggatccttgcccttaattggagaagcagattgcctccatgaaaaatacggtggattaaacaaaagcaagccttactacacaggggaacatgcaaaggccataggaaattgcccaatatgggtgaaaacacccttgaagctggccaatggaaccaaatatagaccccctgcaaaactattaaaggaaagaggtttcttcggagccattgctggtttcttagagggaggatgggaaggaatgattgcaggttggcacggatacacatcccatggggcacatggagtagcggtggcagctgaccttaagagcactcaagaggccataaacaagataacaaaaaatctcaactctttgagtgagctggaagtaaagaatcttcaaagactaagcggtgccatggatgaactccacaacgaaatactagaactagatgagaaagtggatgatctcagagctgacacaataagctcacaaatagaactcgcagtcctgctttccaatgaaggaataataaacagtgaagatgaacatctcttggcgcttgaaagaaagctgaagaaaatgctgggcccctctgctgtagagatagggaatggatgctttgaaaccaaacacaagtgcaaccagacctgcctcgacagaatagctgctggtacctttgatgcaggagaattttctctccccacctttgattcactgaatattactgctgcatctttaaatgacgacggattggacaatcatactatactgctttactactcaactgctgcctccagtttggctgtaacactgatgatagctatctttgttgtttatatggtctccagagacaatgtttcttgctccatttgtctataaggaaagttaagccctgtattttcctttattgtagtgcttgtttgcttgttgtcattacaaagaaacgttattgaaaaatggaagcggagccacgaacttctctctgttaaagcaagcaggagatgttgaagaaaaccccgggcctttcggagctattgctggtttcttggaaggaggatgggaaggaatgattgcaggttggcacggatacacatctcatggagcacatggagtagcagtggcagcagaccttaagagtacccatgatgactcgagctggtactgcatgcacgcaatgctagctgcccctttcccgtcctgggtaccccgagtctcccccgacctcgggtcccaggtatgctcccacctccacctgccccactcaccacctctgctagttccagacacctcccaagcacgcagcaatgcagctcaaaacgcttagcctagccacacccccacgggaaacagcagtgattaacctttagcaataaacgaaagtttaactaagctatactaaccccagggttggtcaatttcgtgccagccacaccctggagctagcaaaaaaaa

SEQ ID NO: 397 - DNA, 11599 bp, synthetic construct
  source 1..11599: mol_type = other DNA; note = Hybrid Vaccine Candidate 9
ctcgacattgattattgactagttattaatagtaatcaattacggggtcattagttcatagcccatatatggagttccgcgttacataacttacggtaaatggcccgcctggctgaccgcccaacgacccccgcccattgacgtcaataatgacgtatgttcccatagtaacgccaatagggactttccattgacgtcaatgggtggagtatttacggtaaactgcccacttggcagtacatcaagtgtatcatatgccaagtacgccccctattgacgtcaatgacggtaaatggcccgcctggcattatgcccagtacatgaccttatgggactttcctacttggcagtacatctacgtattagtcatcgctattaccatggtcgaggtgagccccacgttctgcttcactctccccatctcccccccctccccacccccaattttgtatttatttattttttaattattttgtgcagcgatgggggcggggggggggggggggcgcgcgccaggcggggcggggcggggcgaggggcggggcggggcgaggcggagaggtgcggcggcagccaatcagagcggcgcgctccgaaagtttccttttatggcgaggcggcggcggcggcggccctataaaaagcgaagcgcgcggcgggcgggagtcgctgcgcgctgccttcgccccgtgccccgctccgccgccgcctcgcgccgcccgccccggctctgactgaccgcgttactcccacaggtgagcgggcgggacggcccttctcctccgggctgtaattagcgcttggtttaatgacggcttgtttcttttctgtggctgcgtgaaagccttgaggggctccgggagggccctttgtgcggggggagcggctcggggggtgcgtgcgtgtgtgtgtgcgtggggagcgccgcgtgcggctccgcgctgcccggcggctgtgagcgctgcgggcgcggcgcggggctttgtgcgctccgcagtgtgcgcgaggggagcgcggccgggggcggtgccccgcggtgcggggggggctgcgaggggaacaaaggctgcgtgcggggtgtgtgcgtgggggggtgagcagggggtgtgggcgcgtcggtcgggctgcaaccccccctgcacccccctccccgagttgctgagcacggcccggcttcgggtgcggggctccgtacggggcgtggcgcggggctcgccgtgccgggcggggggtggcggcaggtgggggtgccgggcggggcggggccgcctcgggccggggagggctcgggggaggggcgcggcggcccccggagcgccggcggctgtcgaggcgcggcgagccgcagccattgccttttatggtaatcgtgcgagagggcgcagggacttcctttgtcccaaatctgtgcggagccgaaatctgggaggcgccgccgcaccccctctagcgggcgcggggcgaagcggtgcggcgccggcaggaaggaaatgggcggggagggccttcgtgcgtcgccgcgccgccgtccccttctccctctccagcctcggggctgtccgcggggggacggctgccttcgggggggacggggcagggcggggttcggcttctggcgtgtgaccggcggctctagagcctctgctaaccatgttcatgccttcttctttttcctacagctcctgggcaacgtgctggttattgtgctgtctcatcattttggcaaagaattggagaataaactagtattcttctggtccccacagactcagagagaacccgccaccatgttcgtgttcctggtgctgctgcccctggtgagcagccagtgcgtgaacctgatcaccaggacccagagctacaccaacagcttcaccaggggcgtgtactaccccgacaaggtgttcaggagcagcgtgctgcacagcacccaggacctgttcctgcccttcttcagcaacgtgacctggttccacgccatccacgtgagcggcaccaacggcaccaagaggttcgacaaccccgtgctgcccttcaacgacggcgtgtacttcgccagcaccgagaagagcaacatcatcaggggctggatcttcggcaccaccctggacagcaagacccagagcctgctgatcgtgaacaacgccaccaacgtggtgatcaaggtgtgcgagttccagttctgcaacgaccccttcctggacgtgtactaccacaagaacaacaagagctggatggagagcgagttcagggtgtacagcagcgccaacaactgcaccttcgagtacgtgagccagcccttcctgatggacctggagggcaagcagggcaacttcaagaacctgagggagttcgtgttcaagaacatcgacggctacttcaagatctacagcaagcacacccccatcaacctgggcagggacctgccccagggcttcagcgccctggagcccctggtggacctgcccatcggcatcaacatcaccaggttccagaccctgctggccctgcacaggagctacctgacccccggcgacagcagcagcggctggaccgccggcgccgccgcctactacgtgggctacctgcagcccaggaccttcctgctgaagtacaacgagaacggcaccatcaccgacgccgtggactgcgccctggaccccctgagcgagaccaagtgcaccctgaagagcttcaccgtggagaagggcatctaccagaccagcaacttcagggtgcagcccaccgagagcatcgtgaggttccccaacatcaccaacctgtgccccttcgacgaggtgttcaacgccaccaggttcgccagcgtgtacgcctggaacaggaagaggatcagcaactgcgtggccgactacagcgtgctgtacaacttcgcccccttcttcgccttcaagtgctacggcgtgagccccaccaagctgaacgacctgtgcttcaccaacgtgtacgccgacagcttcgtgatcaggggcaacgaggtgagccagatcgcccccggccagaccggcaacatcgccgactacaactacaagctgcccgacgacttcaccggctgcgtgatcgcctggaacagcaacaagctggacagcaaggtgggcggcaactacaactacctgtacaggctgttcaggaagagcaacctgaagcccttcgagagggacatcagcaccgagatctaccaggccggcaacaagccctgcaacggcgtggccggcttcaactgctacttccccctgaggagctacggcttcaggcccacctacggcgtgggccaccagccctacagggtggtggtgctgagcttcgagctgctgcacgcccccgccaccgtgtgcggccccaagaagagcaccaacctggtgaagaacaagtgcgtgaacttcaacttcaacggcctgaccggcaccggcgtgctgaccgagagcaacaagaagttcctgcccttccagcagttcggcagggacatcgccgacaccaccgacgccgtgagggacccccagaccctggagatcctggacatcaccccctgcagcttcggcggcgtgagcgtgatcacccccggcaccaacaccagcaaccaggtggccgtgctgtaccagggcgtgaactgcaccgaggtgcccgtggccatccacgccgaccagctgacccccacctggagggtgtacagcaccggcagcaacgtgttccagaccagggccggctgcctgatcggcgccgagtacgtgaacaacagctacgagtgcgacatccccatcggcgccggcatctgcgccagctaccagacccagaccaagagccaccagcaggcccagagcgtggccagccagagcatcatcgcctacaccatgagcctgggcgccgagaacagcgtggcctacagcaacaacagcatcgccatccccaccaacttcaccatcagcgtgaccaccgagatcctgcccgtgagcatgaccaagaccagcgtggactgcaccatgtacatctgcggcgacagcaccgagtgcagcaacctgctgctgcagtacggcagcttctgcacccagctgaagagggccctgaccggcatcgccgtggagcaggacaagaacacccaggaggtgttcgcccaggtgaagcagatctacaagaccccccccatcaagtacttcggcggcttcaacttcagccagatcctgcccgaccccagcaagcccagcaagaggagccccatcgaggacctgctgttcaacaaggtgaccctggccgacgccggcttcatcaagcagtacggcgactgcctgggcgacatcgccgccagggacctgatctgcgcccagaagttcaacggcctgaccgtgctgccccccctgctgaccgacgagatgatcgcccagtacaccagcgccctgctggccggcaccatcaccagcggctggaccttcggcgccggccccgccctgcagatccccttccccatgcagatggcctacaggttcaacggcatcggcgtgacccagaacgtgctgtacgagaaccagaagctgatcgccaaccagttcaacagcgccatcggcaagatccaggacagcctgagcagcacccccagcgccctgggcaagctgcaggacgtggtgaaccacaacgcccaggccctgaacaccctggtgaagcagctgagcagcaagttcggcgccatcagcagcgtgctgaacgacatcctgagcaggctggacccccccgaggccgaggtgcagatcgacaggctgatcaccggcaggctgcagagcctgcagacctacgtgacccagcagctgatcagggccgccgagatcagggccagcgccaacctggccgccaccaagatgagcgagtgcgtgctgggccagagcaagagggtggacttctgcggcaagggctaccacctgatgagcttcccccagagcgccccccacggcgtggtgttcctgcacgtgacctacgtgcccgcccaggagaagaacttcaccaccgcccccgccatctgccacgacggcaaggcccacttccccagggagggcgtgttcgtgagcaacggcacccactggttcgtgacccagaggaacttctacgagccccagatcatcaccaccgacaacaccttcgtgagcggcaactgcgacgtggtgatcggcatcgtgaacaacaccgtgtacgaccccctgcagcccgagctggacagcttcaaggaggagctggacaagtacttcaagaaccacaccagccccgacgtggacctgggcgacatcagcggcatcaacgccagcgtggtgaacatccagaaggagatcgacaggctgaacgaggtggccaagaacctgaacgagagcctgatcgacctgcaggagctgggcaagtacgagcagtacatcaagtggccctggtacatctggctgggcttcatcgccggcctgatcgccatcgtgatggtgaccatcatgctgtgctgcatgaccagctgctgcagctgcctgaagggctgctgcagctgcggcagctgctgcaagttcgacgaggacgacagcgagcccgtgctgaagggcgtgaagctgcactacaccggaagcggagccacgaacttctctctgttaaagcaagcaggagatgttgaagaaaaccccgggcctatgaaggcaatactagtagttctgctatatacatttgcaaccgcaaatgcagacacattatgtataggttatcatgcgaacaactcaacagacactgtagacacagtactagaaaagaatgtaacagtaacacactctgttaaccttctagaagacaagcataacgggaaactatgcaaactaagaggggtagccccattgcatttgggtaaatgtaacattgctggctggatcctgggaaatccagagtgtgaatcactctccacagcaagctcatggtcctacattgtggaaacatctagttcagacaatggaacgtgttacccaggagatttcatcgattatgaggagctaagagagcaattgagctcagtgtcatcatttgaaaggtttgagatattccccaagacaagttcatggcccaatcatgactcgaacaaaggtgtaacgacagcatgtcctcatgctggagcaaaaagcttctacaaaaatttaatatggctagttaaaaaaggaaattcatacccaaagctcagcaaatcctacattaatgataaagggaaagaagtcctcgtgctatggggcattcaccatccacctactagtgctgaccaacaaagtctctatcagaatgcagatgcatatgtttttgtggggacatcaagatacagcaagaagttcaagccggaaatagcaataaggcccaaagtgagggatcaagaagggagaatgaactattactggacactagtagagccgggagacaaaataacattcgaagcaactggaaatctagtggtaccgagatatgcattcgcaatggaaagaaatgctggatctggtattatcatttcagatacaccagtccacgattgcaatacaacttgtcagacacccaagggtgctataaacaccagcctcccatttcagaacatacatccgatcacaattggaaaatgtccaaaatatgtaaaaagcacaaaattgagactggccacaggattgaggaatgtcccgtccattcaatctagaggcctatttggggccattgccggtttcattgaaggggggtggacagggatggtagatggatggtacggttatcaccatcaaaatgagcaggggtcaggatatgcagccgacctgaagagcacacagaatgccattgacgagattactaacaaagtaaactctgttattgaaaaaatgaatacacagttcacagcagtaggtaaagagttcaaccacctggaaaaaagaatagagaatttaaataaaaaagttgatgatggtttcctggacatttggacttacaatgccgaactgttggttctattggaaaatgaaagaactttggactaccacgattcaaaggtgaagaacttatatgaaaaggtaagaagccagttaaaaaacaatgccaaggaaattggaaacggctgctttgaattttaccacaaatgtgataacacgtgcatggaaagtgtcaaaaatgggacttatgactacccaaaatactcagaggaagcaaaattaaacagagaagaaatagatggggtaaagctggaatcaacaaggatttaccagattttggcgatctattcaaccgtcgccagttcattggtactggtagtctccctgggggcaatcagtttctggatgtgctctaatgggtctctacagtgtagaatatgtatttaaggaagcggagccacgaacttctctctgttaaagcaagcaggagatgttgaagaaaaccccgggcctagcaaaagcaggggataattctattaaccatgaagactatcattgctttgagctacattctatgtctggttttcgctcaaaaacttcctggaaatgacaatagcactgcaacgctgtgccttgggcaccatgcagtaccaaacggaacgatagtgaaaacaatcacgaatgaccaaattgaagttactaatgctactgagctggttcagaattcctcaataggtgaaatatgcgacagtcctcatcagatccttgatggagaaaactgcacactaatagatgctctattgggagaccctcagtgtgatggctttcaaaataagaaatgggacctttttgttgaacgaagcaaagcctacagcaactgttacccttatgatgtgccggattatgcctcccttaggtcactagttgcctcatccggcacactggagtttaacaatgaaagcttcaattgggctggagtcactcaaaacggaacaagttctgcttgcataaggggatctaatagtagtttctttagtagattaaattggttgacccacttaaacttcaagtacccagcattgaacgtgactatgccaaacaatgaacaatttgacaaattgtacatttggggggttcaccacccgggtacggacaaggaccaaatcttcctgtatgctcaatcatcaggaagaatcacagtatctaccaaaagaagccaacaagctgtaatcccgaatatcggatctagacccagaataaggaatatccctagcagaataagcatctattggacaatagtaaaaccgggagacatacttttgattaacagcacagggaatctaattgctcctaggggttacttcaaaatacgaagtgggaaaagctcaataatgagatcagatgcacccattggcaaatgcaagtctgaatgcatcactccaaatggaagcattcccaatgacaaaccattccaaaatgtaaacaggatcacatacggggcctgtcccagatatgttaagcaaagcactctgaaattggcaacaggaatgcgaaatgtaccagagaaacaaactagaggcatatttggcgcaatagcgggtttcatagaaaatggttgggagggaatggtggatggttggtacggtttcaggcatcaaaattctgagggaagaggacaagcagcagatctcaaaagcactcaagcagcaatcgatcaaatcaatgggaagctgaatcgattgatcgggaaaaccaacgagaaattccatcagattgagaaagaattctcagaagtagaagggagaattcaggaccttgagaaatatgttgaggacacaaaaatagatctctggtcatacaacgcagagcttcttgttgccctggaaaaccaacatacaattgatctaactgactcagaaatgaacaaactgtttgaaaaaacaaagaagcaactgagggaaaatgctgaggatatgggcaatggttgtttcaaaatataccacaaatgtgacaatgcctgcataggatcaatcagaaatggaacttatgaccacgatgtatacagggatgaagcattaaacaaccggttccagatcaagggagttgagctgaagtcagggtacaaagattggatcctatggatttcctttgccatatcatgttttttgctttgtgttgctttgttggggttcatcatgtgggcctgccaaaagggcaacattaggtgcaacatttgcatttgagtgcattaattaaaaacacccttgtttctactggaagcggagccacgaacttctctctgttaaagcaagcaggagatgttgaagaaaaccccgggcctattttctaatatccacaaaatgaaggcaataattgtactactcatggtagtaacatccaatgcagatcgaatctgcactgggataacatcgtcaaactcaccacatgtcgtcaaaactgctactcaaggggaggtcaacgtgaccggtgtaataccactgacaacaacacccaccaaatctcattttgcaaatctcaaaggaacagaaaccagggggaaactatgcccaaaatgcctcaactgcacagatctggatgtagccttgggcagaccaaaatgcacagggaaaataccctctgcaagggtttcaatactccatgaagtcagacctgttacatctgggtgctttcctataatgcacgatagaacaaaaattagacagctgcctaaccttctccgaggatacgaacatgtcaggttatcaactcacaacgttatcaatgcaaaagatgcaccaggaagaccctacgaaattggaacctcagggtcttgccctaacattaccaatggaaacggattcttcgcaacaatggcttgggccgtcccaaaaaacaaaacagcaacaaatccattaacaatagaagtaccatacatttgtacagaaggagaagaccaaattaccgtttgggggttccactctgacaacgagacccaaatggcaaagctctatggggactcaaagccccagaagttcacctcatctgccaacggagtgaccacacattacgtttcacagattggtggcttcccaaatcaaacagaagacggaggactaccacaaagtggcagaattgttgttgattacatggtgcagaaatctggaaaaacaggaacaattacctatcaaagaggtattttattgcctcaaaaagtgtggtgcgcaagtggcaggagcaaggtaataaaaggatccttgcccttaattggagaagcagattgcctccatgaaaaatacggtggattaaacaaaagcaagccttactacacaggggaacatgcaaaggccataggaaattgcccaatatgggtgaaaacacccttgaagctggccaatggaaccaaatatagaccccctgcaaaactattaaaggaaagaggtttcttcggagccattgctggtttcttagagggaggatgggaaggaatgattgcaggttggcacggatacacatcccatggggcacatggagtagcggtggcagctgaccttaagagcactcaagaggccataaacaagataacaaaaaatctcaactctttgagtgagctggaagtaaagaatcttcaaagactaagcggtgccatggatgaactccacaacgaaatactagaactagatgagaaagtggatgatctcagagctgacacaataagctcacaaatagaactcgcagtcctgctttccaatgaaggaataataaacagtgaagatgaacatctcttggcgcttgaaagaaagctgaagaaaatgctgggcccctctgctgtagagatagggaatggatgctttgaaaccaaacacaagtgcaaccagacctgcctcgacagaatagctgctggtacctttgatgcaggagaattttctctccccacctttgattcactgaatattactgctgcatctttaaatgacgacggattggacaatcatactatactgctttactactcaactgctgcctccagtttggctgtaacactgatgatagctatctttgttgtttatatggtctccagagacaatgtttcttgctccatttgtctataaggaaagttaagccctgtattttcctttattgtagtgcttgtttgcttgttgtcattacaaagaaacgttattgaaaaatggaagcggagccacgaacttctctctgttaaagcaagcaggagatgttgaagaaaaccccgggcctttcggagctattgctggtttcttggaaggaggatgggaaggaatgattgcaggttggcacggatacacatctcatggagcacatggagtagcagtggcagcagaccttaagagtacccatgatgactcgagctggtactgcatgcacgcaatgctagctgcccctttcccgtcctgggtaccccgagtctcccccgacctcgggtcccaggtatgctcccacctccacctgccccactcaccacctctgctagttccagacacctcccaagcacgcagcaatgcagctcaaaacgcttagcctagccacacccccacgggaaacagcagtgattaacctttagcaataaacgaaagtttaactaagctatactaaccccagggttggtcaatttcgtgccagccacaccctggagctagcaaaaaaaa

SEQ ID NO: 398 - DNA, 11599 bp, synthetic construct
  source 1..11599: mol_type = other DNA; note = Hybrid Vaccine Candidate 10
ctcgacattgattattgactagttattaatagtaatcaattacggggtcattagttcatagcccatatatggagttccgcgttacataacttacggtaaatggcccgcctggctgaccgcccaacgacccccgcccattgacgtcaataatgacgtatgttcccatagtaacgccaatagggactttccattgacgtcaatgggtggagtatttacggtaaactgcccacttggcagtacatcaagtgtatcatatgccaagtacgccccctattgacgtcaatgacggtaaatggcccgcctggcattatgcccagtacatgaccttatgggactttcctacttggcagtacatctacgtattagtcatcgctattaccatggtcgaggtgagccccacgttctgcttcactctccccatctcccccccctccccacccccaattttgtatttatttattttttaattattttgtgcagcgatgggggcggggggggggggggggcgcgcgccaggcggggcggggcggggcgaggggcggggcggggcgaggcggagaggtgcggcggcagccaatcagagcggcgcgctccgaaagtttccttttatggcgaggcggcggcggcggcggccctataaaaagcgaagcgcgcggcgggcgggagtcgctgcgcgctgccttcgccccgtgccccgctccgccgccgcctcgcgccgcccgccccggctctgactgaccgcgttactcccacaggtgagcgggcgggacggcccttctcctccgggctgtaattagcgcttggtttaatgacggcttgtttcttttctgtggctgcgtgaaagccttgaggggctccgggagggccctttgtgcggggggagcggctcggggggtgcgtgcgtgtgtgtgtgcgtggggagcgccgcgtgcggctccgcgctgcccggcggctgtgagcgctgcgggcgcggcgcggggctttgtgcgctccgcagtgtgcgcgaggggagcgcggccgggggcggtgccccgcggtgcggggggggctgcgaggggaacaaaggctgcgtgcggggtgtgtgcgtgggggggtgagcagggggtgtgggcgcgtcggtcgggctgcaaccccccctgcacccccctccccgagttgctgagcacggcccggcttcgggtgcggggctccgtacggggcgtggcgcggggctcgccgtgccgggcggggggtggcggcaggtgggggtgccgggcggggcggggccgcctcgggccggggagggctcgggggaggggcgcggcggcccccggagcgccggcggctgtcgaggcgcggcgagccgcagccattgccttttatggtaatcgtgcgagagggcgcagggacttcctttgtcccaaatctgtgcggagccgaaatctgggaggcgccgccgcaccccctctagcgggcgcggggcgaagcggtgcggcgccggcaggaaggaaatgggcggggagggccttcgtgcgtcgccgcgccgccgtccccttctccctctccagcctcggggctgtccgcggggggacggctgccttcgggggggacggggcagggcggggttcggcttctggcgtgtgaccggcggctctagagcctctgctaaccatgttcatgccttcttctttttcctacagctcctgggcaacgtgctggttattgtgctgtctcatcattttggcaaagaattggagaataaactagtattcttctggtccccacagactcagagagaacccgccaccatgttcgtgttcctggtgctgctgcccctggtgagcagccagtgcgtgaacctgatcaccaggacccagagctacaccaacagcttcaccaggggcgtgtactaccccgacaaggtgttcaggagcagcgtgctgcacagcacccaggacctgttcctgcccttcttcagcaacgtgacctggttccacgccatccacgtgagcggcaccaacggcaccaagaggttcgacaaccccgtgctgcccttcaacgacggcgtgtacttcgccagcaccgagaagagcaacatcatcaggggctggatcttcggcaccaccctggacagcaagacccagagcctgctgatcgtgaacaacgccaccaacgtggtgatcaaggtgtgcgagttccagttctgcaacgaccccttcctggacgtgtactaccacaagaacaacaagagctggatggagagcgagttcagggtgtacagcagcgccaacaactgcaccttcgagtacgtgagccagcccttcctgatggacctggagggcaagcagggcaacttcaagaacctgagggagttcgtgttcaagaacatcgacggctacttcaagatctacagcaagcacacccccatcaacctgggcagggacctgccccagggcttcagcgccctggagcccctggtggacctgcccatcggcatcaacatcaccaggttccagaccctgctggccctgcacaggagctacctgacccccggcgacagcagcagcggctggaccgccggcgccgccgcctactacgtgggctacctgcagcccaggaccttcctgctgaagtacaacgagaacggcaccatcaccgacgccgtggactgcgccctggaccccctgagcgagaccaagtgcaccctgaagagcttcaccgtggagaagggcatctaccagaccagcaacttcagggtgcagcccaccgagagcatcgtgaggttccccaacatcaccaacctgtgccccttcgacgaggtgttcaacgccaccaggttcgccagcgtgtacgcctggaacaggaagaggatcagcaactgcgtggccgactacagcgtgctgtacaacttcgcccccttcttcgccttcaagtgctacggcgtgagccccaccaagctgaacgacctgtgcttcaccaacgtgtacgccgacagcttcgtgatcaggggcaacgaggtgagccagatcgcccccggccagaccggcaacatcgccgactacaactacaagctgcccgacgacttcaccggctgcgtgatcgcctggaacagcaacaagctggacagcaaggtgggcggcaactacaactacctgtacaggctgttcaggaagagcaacctgaagcccttcgagagggacatcagcaccgagatctaccaggccggcaacaagccctgcaacggcgtggccggcttcaactgctacttccccctgaggagctacggcttcaggcccacctacggcgtgggccaccagccctacagggtggtggtgctgagcttcgagctgctgcacgcccccgccaccgtgtgcggccccaagaagagcaccaacctggtgaagaacaagtgcgtgaacttcaacttcaacggcctgaccggcaccggcgtgctgaccgagagcaacaagaagttcctgcccttccagcagttcggcagggacatcgccgacaccaccgacgccgtgagggacccccagaccctggagatcctggacatcaccccctgcagcttcggcggcgtgagcgtgatcacccccggcaccaacaccagcaaccaggtggccgtgctgtaccagggcgtgaactgcaccgaggtgcccgtggccatccacgccgaccagctgacccccacctggagggtgtacagcaccggcagcaacgtgttccagaccagggccggctgcctgatcggcgccgagtacgtgaacaacagctacgagtgcgacatccccatcggcgccggcatctgcgccagctaccagacccagaccaagagccaccagcaggcccagagcgtggccagccagagcatcatcgcctacaccatgagcctgggcgccgagaacagcgtggcctacagcaacaacagcatcgccatccccaccaacttcaccatcagcgtgaccaccgagatcctgcccgtgagcatgaccaagaccagcgtggactgcaccatgtacatctgcggcgacagcaccgagtgcagcaacctgctgctgcagtacggcagcttctgcacccagctgaagagggccctgaccggcatcgccgtggagcaggacaagaacacccaggaggtgttcgcccaggtgaagcagatctacaagaccccccccatcaagtacttcggcggcttcaacttcagccagatcctgcccgaccccagcaagcccagcaagaggagcttcatcgaggacctgctgttcaacaaggtgaccctggccgacgccggcttcatcaagcagtacggcgactgcctgggcgacatcgccgccagggacctgatctgcgcccagaagttcaacggcctgaccgtgctgccccccctgctgaccgacgagatgatcgcccagtacaccagcgccctgctggccggcaccatcaccagcggctggaccttcggcgccggcgccgccctgcagatccccttcgccatgcagatggcctacaggttcaacggcatcggcgtgacccagaacgtgctgtacgagaaccagaagctgatcgccaaccagttcaacagcgccatcggcaagatccaggacagcctgagcagcaccgccagcgccctgggcaagctgcaggacgtggtgaaccacaacgcccaggccctgaacaccctggtgaagcagctgagcagcaagttcggcgccatcagcagcgtgctgaacgacatcctgagcaggctggacccccccgaggccgaggtgcagatcgacaggctgatcaccggcaggctgcagagcctgcagacctacgtgacccagcagctgatcagggccgccgagatcagggccagcgccaacctggccgccaccaagatgagcgagtgcgtgctgggccagagcaagagggtggacttctgcggcaagggctaccacctgatgagcttcccccagagcgccccccacggcgtggtgttcctgcacgtgacctacgtgcccgcccaggagaagaacttcaccaccgcccccgccatctgccacgacggcaaggcccacttccccagggagggcgtgttcgtgagcaacggcacccactggttcgtgacccagaggaacttctacgagccccagatcatcaccaccgacaacaccttcgtgagcggcaactgcgacgtggtgatcggcatcgtgaacaacaccgtgtacgaccccctgcagcccgagctggacagcttcaaggaggagctggacaagtacttcaagaaccacaccagccccgacgtggacctgggcgacatcagcggcatcaacgccagcgtggtgaacatccagaaggagatcgacaggctgaacgaggtggccaagaacctgaacgagagcctgatcgacctgcaggagctgggcaagtacgagcagtacatcaagtggccctggtacatctggctgggcttcatcgccggcctgatcgccatcgtgatggtgaccatcatgctgtgctgcatgaccagctgctgcagctgcctgaagggctgctgcagctgcggcagctgctgcaagttcgacgaggacgacagcgagcccgtgctgaagggcgtgaagctgcactacaccggaagcggagccacgaacttctctctgttaaagcaagcaggagatgttgaagaaaaccccgggcctatgaaggcaatactagtagttctgctatatacatttgcaaccgcaaatgcagacacattatgtataggttatcatgcgaacaactcaacagacactgtagacacagtactagaaaagaatgtaacagtaacacactctgttaaccttctagaagacaagcataacgggaaactatgcaaactaagaggggtagccccattgcatttgggtaaatgtaacattgctggctggatcctgggaaatccagagtgtgaatcactctccacagcaagctcatggtcctacattgtggaaacatctagttcagacaatggaacgtgttacccaggagatttcatcgattatgaggagctaagagagcaattgagctcagtgtcatcatttgaaaggtttgagatattccccaagacaagttcatggcccaatcatgactcgaacaaaggtgtaacgacagcatgtcctcatgctggagcaaaaagcttctacaaaaatttaatatggctagttaaaaaaggaaattcatacccaaagctcagcaaatcctacattaatgataaagggaaagaagtcctcgtgctatggggcattcaccatccacctactagtgctgaccaacaaagtctctatcagaatgcagatgcatatgtttttgtggggacatcaagatacagcaagaagttcaagccggaaatagcaataaggcccaaagtgagggatcaagaagggagaatgaactattactggacactagtagagccgggagacaaaataacattcgaagcaactggaaatctagtggtaccgagatatgcattcgcaatggaaagaaatgctggatctggtattatcatttcagatacaccagtccacgattgcaatacaacttgtcagacacccaagggtgctataaacaccagcctcccatttcagaacatacatccgatcacaattggaaaatgtccaaaatatgtaaaaagcacaaaattgagactggccacaggattgaggaatgtcccgtccattcaatctagaggcctatttggggccattgccggtttcattgaaggggggtggacagggatggtagatggatggtacggttatcaccatcaaaatgagcaggggtcaggatatgcagccgacctgaagagcacacagaatgccattgacgagattactaacaaagtaaactctgttattgaaaaaatgaatacacagttcacagcagtaggtaaagagttcaaccacctggaaaaaagaatagagaatttaaataaaaaagttgatgatggtttcctggacatttggacttacaatgccgaactgttggttctattggaaaatgaaagaactttggactaccacgattcaaaggtgaagaacttatatgaaaaggtaagaagccagttaaaaaacaatgccaaggaaattggaaacggctgctttgaattttaccacaaatgtgataacacgtgcatggaaagtgtcaaaaatgggacttatgactacccaaaatactcagaggaagcaaaattaaacagagaagaaatagatggggtaaagctggaatcaacaaggatttaccagattttggcgatctattcaaccgtcgccagttcattggtactggtagtctccctgggggcaatcagtttctggatgtgctctaatgggtctctacagtgtagaatatgtatttaaggaagcggagccacgaacttctctctgttaaagcaagcaggagatgttgaagaaaaccccgggcctagcaaaagcaggggataattctattaaccatgaagactatcattgctttgagctacattctatgtctggttttcgctcaaaaacttcctggaaatgacaatagcactgcaacgctgtgccttgggcaccatgcagtaccaaacggaacgatagtgaaaacaatcacgaatgaccaaattgaagttactaatgctactgagctggttcagaattcctcaataggtgaaatatgcgacagtcctcatcagatccttgatggagaaaactgcacactaatagatgctctattgggagaccctcagtgtgatggctttcaaaataagaaatgggacctttttgttgaacgaagcaaagcctacagcaactgttacccttatgatgtgccggattatgcctcccttaggtcactagttgcctcatccggcacactggagtttaacaatgaaagcttcaattgggctggagtcactcaaaacggaacaagttctgcttgcataaggggatctaatagtagtttctttagtagattaaattggttgacccacttaaacttcaagtacccagcattgaacgtgactatgccaaacaatgaacaatttgacaaattgtacatttggggggttcaccacccgggtacggacaaggaccaaatcttcctgtatgctcaatcatcaggaagaatcacagtatctaccaaaagaagccaacaagctgtaatcccgaatatcggatctagacccagaataaggaatatccctagcagaataagcatctattggacaatagtaaaaccgggagacatacttttgattaacagcacagggaatctaattgctcctaggggttacttcaaaatacgaagtgggaaaagctcaataatgagatcagatgcacccattggcaaatgcaagtctgaatgcatcactccaaatggaagcattcccaatgacaaaccattccaaaatgtaaacaggatcacatacggggcctgtcccagatatgttaagcaaagcactctgaaattggcaacaggaatgcgaaatgtaccagagaaacaaactagaggcatatttggcgcaatagcgggtttcatagaaaatggttgggagggaatggtggatggttggtacggtttcaggcatcaaaattctgagggaagaggacaagcagcagatctcaaaagcactcaagcagcaatcgatcaaatcaatgggaagctgaatcgattgatcgggaaaaccaacgagaaattccatcagattgagaaagaattctcagaagtagaagggagaattcaggaccttgagaaatatgttgaggacacaaaaatagatctctggtcatacaacgcagagcttcttgttgccctggaaaaccaacatacaattgatctaactgactcagaaatgaacaaactgtttgaaaaaacaaagaagcaactgagggaaaatgctgaggatatgggcaatggttgtttcaaaatataccacaaatgtgacaatgcctgcataggatcaatcagaaatggaacttatgaccacgatgtatacagggatgaagcattaaacaaccggttccagatcaagggagttgagctgaagtcagggtacaaagattggatcctatggatttcctttgccatatcatgttttttgctttgtgttgctttgttggggttcatcatgtgggcctgccaaaagggcaacattaggtgcaacatttgcatttgagtgcattaattaaaaacacccttgtttctactggaagcggagccacgaacttctctctgttaaagcaagcaggagatgttgaagaaaaccccgggcctattttctaatatccacaaaatgaaggcaataattgtactactcatggtagtaacatccaatgcagatcgaatctgcactgggataacatcgtcaaactcaccacatgtcgtcaaaactgctactcaaggggaggtcaacgtgaccggtgtaataccactgacaacaacacccaccaaatctcattttgcaaatctcaaaggaacagaaaccagggggaaactatgcccaaaatgcctcaactgcacagatctggatgtagccttgggcagaccaaaatgcacagggaaaataccctctgcaagggtttcaatactccatgaagtcagacctgttacatctgggtgctttcctataatgcacgatagaacaaaaattagacagctgcctaaccttctccgaggatacgaacatgtcaggttatcaactcacaacgttatcaatgcaaaagatgcaccaggaagaccctacgaaattggaacctcagggtcttgccctaacattaccaatggaaacggattcttcgcaacaatggcttgggccgtcccaaaaaacaaaacagcaacaaatccattaacaatagaagtaccatacatttgtacagaaggagaagaccaaattaccgtttgggggttccactctgacaacgagacccaaatggcaaagctctatggggactcaaagccccagaagttcacctcatctgccaacggagtgaccacacattacgtttcacagattggtggcttcccaaatcaaacagaagacggaggactaccacaaagtggcagaattgttgttgattacatggtgcagaaatctggaaaaacaggaacaattacctatcaaagaggtattttattgcctcaaaaagtgtggtgcgcaagtggcaggagcaaggtaataaaaggatccttgcccttaattggagaagcagattgcctccatgaaaaatacggtggattaaacaaaagcaagccttactacacaggggaacatgcaaaggccataggaaattgcccaatatgggtgaaaacacccttgaagctggccaatggaaccaaatatagaccccctgcaaaactattaaaggaaagaggtttcttcggagccattgctggtttcttagagggaggatgggaaggaatgattgcaggttggcacggatacacatcccatggggcacatggagtagcggtggcagctgaccttaagagcactcaagaggccataaacaagataacaaaaaatctcaactctttgagtgagctggaagtaaagaatcttcaaagactaagcggtgccatggatgaactccacaacgaaatactagaactagatgagaaagtggatgatctcagagctgacacaataagctcacaaatagaactcgcagtcctgctttccaatgaaggaataataaacagtgaagatgaacatctcttggcgcttgaaagaaagctgaagaaaatgctgggcccctctgctgtagagatagggaatggatgctttgaaaccaaacacaagtgcaaccagacctgcctcgacagaatagctgctggtacctttgatgcaggagaattttctctccccacctttgattcactgaatattactgctgcatctttaaatgacgacggattggacaatcatactatactgctttactactcaactgctgcctccagtttggctgtaacactgatgatagctatctttgttgtttatatggtctccagagacaatgtttcttgctccatttgtctataaggaaagttaagccctgtattttcctttattgtagtgcttgtttgcttgttgtcattacaaagaaacgttattgaaaaatggaagcggagccacgaacttctctctgttaaagcaagcaggagatgttgaagaaaaccccgggcctttcggagctattgctggtttcttggaaggaggatgggaaggaatgattgcaggttggcacggatacacatctcatggagcacatggagtagcagtggcagcagaccttaagagtacccatgatgactcgagctggtactgcatgcacgcaatgctagctgcccctttcccgtcctgggtaccccgagtctcccccgacctcgggtcccaggtatgctcccacctccacctgccccactcaccacctctgctagttccagacacctcccaagcacgcagcaatgcagctcaaaacgcttagcctagccacacccccacgggaaacagcagtgattaacctttagcaataaacgaaagtttaactaagctatactaaccccagggttggtcaatttcgtgccagccacaccctggagctagcaaaaaaaa

SEQ ID NO: 399 - DNA, 10464 bp, synthetic construct
  source 1..10464: mol_type = other DNA; note = Hybrid Vaccine 11
tagttattaatagtaatcaattacggggtcattagttcatagcccatatatggagttccgcgttacataacttacggtaaatggcccgcctggctgaccgcccaacgacccccgcccattgacgtcaataatgacgtatgttcccatagtaacgccaatagggactttccattgacgtcaatgggtggagtatttacggtaaactgcccacttggcagtacatcaagtgtatcatatgccaagtacgccccctattgacgtcaatgacggtaaatggcccgcctggcattatgcccagtacatgaccttatgggactttcctacttggcagtacatctacgtattagtcatcgctattaccatggtgatgcggttttggcagtacatcaatgggcgtggatagcggtttgactcacggggatttccaagtctccaccccattgacgtcaatgggagtttgttttggcaccaaaatcaacgggactttccaaaatgtcgtaacaactccgccccattgacgcaaatgggcggtaggcgtgtacggtgggaggtctatataagcagagctggtttagtgaaccgtcagatcgagaataaactagtattcttctggtccccacagactcagagagaacccgccaccatgttcgtgttcctggtgctgctgcccctggtgagcagccagtgcgtgaacctgaccaccaggacccagctgccccccgcctacaccaacagcttcaccaggggcgtgtactaccccgacaaggtgttcaggagcagcgtgctgcacagcacccaggacctgttcctgcccttcttcagcaacgtgacctggttccacgccatccacgtgagcggcaccaacggcaccaagaggttcgacaaccccgtgctgcccttcaacgacggcgtgtacttcgccagcaccgagaagagcaacatcatcaggggctggatcttcggcaccaccctggacagcaagacccagagcctgctgatcgtgaacaacgccaccaacgtggtgatcaaggtgtgcgagttccagttctgcaacgaccccttcctgggcgtgtactaccacaagaacaacaagagctggatggagagcgagttcagggtgtacagcagcgccaacaactgcaccttcgagtacgtgagccagcccttcctgatggacctggagggcaagcagggcaacttcaagaacctgagggagttcgtgttcaagaacatcgacggctacttcaagatctacagcaagcacacccccatcaacctggtgagggacctgccccagggcttcagcgccctggagcccctggtggacctgcccatcggcatcaacatcaccaggttccagaccctgctggccctgcacaggagctacctgacccccggcgacagcagcagcggctggaccgccggcgccgccgcctactacgtgggctacctgcagcccaggaccttcctgctgaagtacaacgagaacggcaccatcaccgacgccgtggactgcgccctggaccccctgagcgagaccaagtgcaccctgaagagcttcaccgtggagaagggcatctaccagaccagcaacttcagggtgcagcccaccgagagcatcgtgaggttccccaacatcaccaacctgtgccccttcggcgaggtgttcaacgccaccaggttcgccagcgtgtacgcctggaacaggaagaggatcagcaactgcgtggccgactacagcgtgctgtacaacagcgccagcttcagcaccttcaagtgctacggcgtgagccccaccaagctgaacgacctgtgcttcaccaacgtgtacgccgacagcttcgtgatcaggggcgacgaggtgaggcagatcgcccccggccagaccggcaagatcgccgactacaactacaagctgcccgacgacttcaccggctgcgtgatcgcctggaacagcaacaacctggacagcaaggtgggcggcaactacaactacctgtacaggctgttcaggaagagcaacctgaagcccttcgagagggacatcagcaccgagatctaccaggccggcagcaccccctgcaacggcgtggagggcttcaactgctacttccccctgcagagctacggcttccagcccaccaacggcgtgggctaccagccctacagggtggtggtgctgagcttcgagctgctgcacgcccccgccaccgtgtgcggccccaagaagagcaccaacctggtgaagaacaagtgcgtgaacttcaacttcaacggcctgaccggcaccggcgtgctgaccgagagcaacaagaagttcctgcccttccagcagttcggcagggacatcgccgacaccaccgacgccgtgagggacccccagaccctggagatcctggacatcaccccctgcagcttcggcggcgtgagcgtgatcacccccggcaccaacaccagcaaccaggtggccgtgctgtaccaggacgtgaactgcaccgaggtgcccgtggccatccacgccgaccagctgacccccacctggagggtgtacagcaccggcagcaacgtgttccagaccagggccggctgcctgatcggcgccgagcacgtgaacaacagctacgagtgcgacatccccatcggcgccggcatctgcgccagctaccagacccagaccaacagccccggcagcgccagcagcgtggccagccagagcatcatcgcctacaccatgagcctgggcgccgagaacagcgtggcctacagcaacaacagcatcgccatccccaccaacttcaccatcagcgtgaccaccgagatcctgcccgtgagcatgaccaagaccagcgtggactgcaccatgtacatctgcggcgacagcaccgagtgcagcaacctgctgctgcagtacggcagcttctgcacccagctgaacagggccctgaccggcatcgccgtggagcaggacaagaacacccaggaggtgttcgcccaggtgaagcagatctacaagaccccccccatcaaggacttcggcggcttcaacttcagccagatcctgcccgaccccagcaagcccagcaagaggagccccatcgaggacctgctgttcaacaaggtgaccctggccgacgccggcttcatcaagcagtacggcgactgcctgggcgacatcgccgccagggacctgatctgcgcccagaagttcaacggcctgaccgtgctgccccccctgctgaccgacgagatgatcgcccagtacaccagcgccctgctggccggcaccatcaccagcggctggaccttcggcgccggccccgccctgcagatccccttccccatgcagatggcctacaggttcaacggcatcggcgtgacccagaacgtgctgtacgagaaccagaagctgatcgccaaccagttcaacagcgccatcggcaagatccaggacagcctgagcagcacccccagcgccctgggcaagctgcaggacgtggtgaaccagaacgcccaggccctgaacaccctggtgaagcagctgagcagcaacttcggcgccatcagcagcgtgctgaacgacatcctgagcaggctggacccccccgaggccgaggtgcagatcgacaggctgatcaccggcaggctgcagagcctgcagacctacgtgacccagcagctgatcagggccgccgagatcagggccagcgccaacctggccgccaccaagatgagcgagtgcgtgctgggccagagcaagagggtggacttctgcggcaagggctaccacctgatgagcttcccccagagcgccccccacggcgtggtgttcctgcacgtgacctacgtgcccgcccaggagaagaacttcaccaccgcccccgccatctgccacgacggcaaggcccacttccccagggagggcgtgttcgtgagcaacggcacccactggttcgtgacccagaggaacttctacgagccccagatcatcaccaccgacaacaccttcgtgagcggcaactgcgacgtggtgatcggcatcgtgaacaacaccgtgtacgaccccctgcagcccgagctggacagcttcaaggaggagctggacaagtacttcaagaaccacaccagccccgacgtggacctgggcgacatcagcggcatcaacgccagcgtggtgaacatccagaaggagatcgacaggctgaacgaggtggccaagaacctgaacgagagcctgatcgacctgcaggagctgggcaagtacgagcagtacatcaagtggccctggtacatctggctgggcttcatcgccggcctgatcgccatcgtgatggtgaccatcatgctgtgctgcatgaccagctgctgcagctgcctgaagggctgctgcagctgcggcagctgctgcaagttcgacgaggacgacagcgagcccgtgctgaagggcgtgaagctgcactacaccggaagcggagccacgaacttctctctgttaaagcaagcaggagatgttgaagaaaaccccgggcctatgaaggcaatactagtagttctgctatatacatttgcaaccgcaaatgcagacacattatgtataggttatcatgcgaacaactcaacagacactgtagacacagtactagaaaagaatgtaacagtaacacactctgttaaccttctagaagacaagcataacgggaaactatgcaaactaagaggggtagccccattgcatttgggtaaatgtaacattgctggctggatcctgggaaatccagagtgtgaatcactctccacagcaagctcatggtcctacattgtggaaacatctagttcagacaatggaacgtgttacccaggagatttcatcgattatgaggagctaagagagcaattgagctcagtgtcatcatttgaaaggtttgagatattccccaagacaagttcatggcccaatcatgactcgaacaaaggtgtaacgacagcatgtcctcatgctggagcaaaaagcttctacaaaaatttaatatggctagttaaaaaaggaaattcatacccaaagctcagcaaatcctacattaatgataaagggaaagaagtcctcgtgctatggggcattcaccatccacctactagtgctgaccaacaaagtctctatcagaatgcagatgcatatgtttttgtggggacatcaagatacagcaagaagttcaagccggaaatagcaataaggcccaaagtgagggatcaagaagggagaatgaactattactggacactagtagagccgggagacaaaataacattcgaagcaactggaaatctagtggtaccgagatatgcattcgcaatggaaagaaatgctggatctggtattatcatttcagatacaccagtccacgattgcaatacaacttgtcagacacccaagggtgctataaacaccagcctcccatttcagaacatacatccgatcacaattggaaaatgtccaaaatatgtaaaaagcacaaaattgagactggccacaggattgaggaatgtcccgtccattcaatctagaggcctatttggggccattgccggtttcattgaaggggggtggacagggatggtagatggatggtacggttatcaccatcaaaatgagcaggggtcaggatatgcagccgacctgaagagcacacagaatgccattgacgagattactaacaaagtaaactctgttattgaaaaaatgaatacacagttcacagcagtaggtaaagagttcaaccacctggaaaaaagaatagagaatttaaataaaaaagttgatgatggtttcctggacatttggacttacaatgccgaactgttggttctattggaaaatgaaagaactttggactaccacgattcaaaggtgaagaacttatatgaaaaggtaagaagccagttaaaaaacaatgccaaggaaattggaaacggctgctttgaattttaccacaaatgtgataacacgtgcatggaaagtgtcaaaaatgggacttatgactacccaaaatactcagaggaagcaaaattaaacagagaagaaatagatggggtaaagctggaatcaacaaggatttaccagattttggcgatctattcaaccgtcgccagttcattggtactggtagtctccctgggggcaatcagtttctggatgtgctctaatgggtctctacagtgtagaatatgtatttaaggaagcggagccacgaacttctctctgttaaagcaagcaggagatgttgaagaaaaccccgggcctagcaaaagcaggggataattctattaaccatgaagactatcattgctttgagctacattctatgtctggttttcgctcaaaaacttcctggaaatgacaatagcactgcaacgctgtgccttgggcaccatgcagtaccaaacggaacgatagtgaaaacaatcacgaatgaccaaattgaagttactaatgctactgagctggttcagaattcctcaataggtgaaatatgcgacagtcctcatcagatccttgatggagaaaactgcacactaatagatgctctattgggagaccctcagtgtgatggctttcaaaataagaaatgggacctttttgttgaacgaagcaaagcctacagcaactgttacccttatgatgtgccggattatgcctcccttaggtcactagttgcctcatccggcacactggagtttaacaatgaaagcttcaattgggctggagtcactcaaaacggaacaagttctgcttgcataaggggatctaatagtagtttctttagtagattaaattggttgacccacttaaacttcaagtacccagcattgaacgtgactatgccaaacaatgaacaatttgacaaattgtacatttggggggttcaccacccgggtacggacaaggaccaaatcttcctgtatgctcaatcatcaggaagaatcacagtatctaccaaaagaagccaacaagctgtaatcccgaatatcggatctagacccagaataaggaatatccctagcagaataagcatctattggacaatagtaaaaccgggagacatacttttgattaacagcacagggaatctaattgctcctaggggttacttcaaaatacgaagtgggaaaagctcaataatgagatcagatgcacccattggcaaatgcaagtctgaatgcatcactccaaatggaagcattcccaatgacaaaccattccaaaatgtaaacaggatcacatacggggcctgtcccagatatgttaagcaaagcactctgaaattggcaacaggaatgcgaaatgtaccagagaaacaaactagaggcatatttggcgcaatagcgggtttcatagaaaatggttgggagggaatggtggatggttggtacggtttcaggcatcaaaattctgagggaagaggacaagcagcagatctcaaaagcactcaagcagcaatcgatcaaatcaatgggaagctgaatcgattgatcgggaaaaccaacgagaaattccatcagattgagaaagaattctcagaagtagaagggagaattcaggaccttgagaaatatgttgaggacacaaaaatagatctctggtcatacaacgcagagcttcttgttgccctggaaaaccaacatacaattgatctaactgactcagaaatgaacaaactgtttgaaaaaacaaagaagcaactgagggaaaatgctgaggatatgggcaatggttgtttcaaaatataccacaaatgtgacaatgcctgcataggatcaatcagaaatggaacttatgaccacgatgtatacagggatgaagcattaaacaaccggttccagatcaagggagttgagctgaagtcagggtacaaagattggatcctatggatttcctttgccatatcatgttttttgctttgtgttgctttgttggggttcatcatgtgggcctgccaaaagggcaacattaggtgcaacatttgcatttgagtgcattaattaaaaacacccttgtttctactggaagcggagccacgaacttctctctgttaaagcaagcaggagatgttgaagaaaaccccgggcctattttctaatatccacaaaatgaaggcaataattgtactactcatggtagtaacatccaatgcagatcgaatctgcactgggataacatcgtcaaactcaccacatgtcgtcaaaactgctactcaaggggaggtcaacgtgaccggtgtaataccactgacaacaacacccaccaaatctcattttgcaaatctcaaaggaacagaaaccagggggaaactatgcccaaaatgcctcaactgcacagatctggatgtagccttgggcagaccaaaatgcacagggaaaataccctctgcaagggtttcaatactccatgaagtcagacctgttacatctgggtgctttcctataatgcacgatagaacaaaaattagacagctgcctaaccttctccgaggatacgaacatgtcaggttatcaactcacaacgttatcaatgcaaaagatgcaccaggaagaccctacgaaattggaacctcagggtcttgccctaacattaccaatggaaacggattcttcgcaacaatggcttgggccgtcccaaaaaacaaaacagcaacaaatccattaacaatagaagtaccatacatttgtacagaaggagaagaccaaattaccgtttgggggttccactctgacaacgagacccaaatggcaaagctctatggggactcaaagccccagaagttcacctcatctgccaacggagtgaccacacattacgtttcacagattggtggcttcccaaatcaaacagaagacggaggactaccacaaagtggcagaattgttgttgattacatggtgcagaaatctggaaaaacaggaacaattacctatcaaagaggtattttattgcctcaaaaagtgtggtgcgcaagtggcaggagcaaggtaataaaaggatccttgcccttaattggagaagcagattgcctccatgaaaaatacggtggattaaacaaaagcaagccttactacacaggggaacatgcaaaggccataggaaattgcccaatatgggtgaaaacacccttgaagctggccaatggaaccaaatatagaccccctgcaaaactattaaaggaaagaggtttcttcggagccattgctggtttcttagagggaggatgggaaggaatgattgcaggttggcacggatacacatcccatggggcacatggagtagcggtggcagctgaccttaagagcactcaagaggccataaacaagataacaaaaaatctcaactctttgagtgagctggaagtaaagaatcttcaaagactaagcggtgccatggatgaactccacaacgaaatactagaactagatgagaaagtggatgatctcagagctgacacaataagctcacaaatagaactcgcagtcctgctttccaatgaaggaataataaacagtgaagatgaacatctcttggcgcttgaaagaaagctgaagaaaatgctgggcccctctgctgtagagatagggaatggatgctttgaaaccaaacacaagtgcaaccagacctgcctcgacagaatagctgctggtacctttgatgcaggagaattttctctccccacctttgattcactgaatattactgctgcatctttaaatgacgacggattggacaatcatactatactgctttactactcaactgctgcctccagtttggctgtaacactgatgatagctatctttgttgtttatatggtctccagagacaatgtttcttgctccatttgtctataaggaaagttaagccctgtattttcctttattgtagtgcttgtttgcttgttgtcattacaaagaaacgttattgaaaaatggaagcggagccacgaacttctctctgttaaagcaagcaggagatgttgaagaaaaccccgggcctttcggagctattgctggtttcttggaaggaggatgggaaggaatgattgcaggttggcacggatacacatctcatggagcacatggagtagcagtggcagcagaccttaagagtacccatgatgactcgagctggtactgcatgcacgcaatgctagctgcccctttcccgtcctgggtaccccgagtctcccccgacctcgggtcccaggtatgctcccacctccacctgccccactcaccacctctgctagttccagacacctcccaagcacgcagcaatgcagctcaaaacgcttagcctagccacacccccacgggaaacagcagtgattaacctttagcaataaacgaaagtttaactaagctatactaaccccagggttggtcaatttcgtgccagccacaccctggagctagcaaaaaaaa

SEQ ID NO: 400 - DNA, 10464 bp, synthetic construct
  source 1..10464: mol_type = other DNA; note = Hybrid Vaccine Candidate 12
tagttattaatagtaatcaattacggggtcattagttcatagcccatatatggagttccgcgttacataacttacggtaaatggcccgcctggctgaccgcccaacgacccccgcccattgacgtcaataatgacgtatgttcccatagtaacgccaatagggactttccattgacgtcaatgggtggagtatttacggtaaactgcccacttggcagtacatcaagtgtatcatatgccaagtacgccccctattgacgtcaatgacggtaaatggcccgcctggcattatgcccagtacatgaccttatgggactttcctacttggcagtacatctacgtattagtcatcgctattaccatggtgatgcggttttggcagtacatcaatgggcgtggatagcggtttgactcacggggatttccaagtctccaccccattgacgtcaatgggagtttgttttggcaccaaaatcaacgggactttccaaaatgtcgtaacaactccgccccattgacgcaaatgggcggtaggcgtgtacggtgggaggtctatataagcagagctggtttagtgaaccgtcagatcgagaataaactagtattcttctggtccccacagactcagagagaacccgccaccatgttcgtgttcctggtgctgctgcccctggtgagcagccagtgcgtgaacctgaccaccaggacccagctgccccccgcctacaccaacagcttcaccaggggcgtgtactaccccgacaaggtgttcaggagcagcgtgctgcacagcacccaggacctgttcctgcccttcttcagcaacgtgacctggttccacgccatccacgtgagcggcaccaacggcaccaagaggttcgacaaccccgtgctgcccttcaacgacggcgtgtacttcgccagcaccgagaagagcaacatcatcaggggctggatcttcggcaccaccctggacagcaagacccagagcctgctgatcgtgaacaacgccaccaacgtggtgatcaaggtgtgcgagttccagttctgcaacgaccccttcctgggcgtgtactaccacaagaacaacaagagctggatggagagcgagttcagggtgtacagcagcgccaacaactgcaccttcgagtacgtgagccagcccttcctgatggacctggagggcaagcagggcaacttcaagaacctgagggagttcgtgttcaagaacatcgacggctacttcaagatctacagcaagcacacccccatcaacctggtgagggacctgccccagggcttcagcgccctggagcccctggtggacctgcccatcggcatcaacatcaccaggttccagaccctgctggccctgcacaggagctacctgacccccggcgacagcagcagcggctggaccgccggcgccgccgcctactacgtgggctacctgcagcccaggaccttcctgctgaagtacaacgagaacggcaccatcaccgacgccgtggactgcgccctggaccccctgagcgagaccaagtgcaccctgaagagcttcaccgtggagaagggcatctaccagaccagcaacttcagggtgcagcccaccgagagcatcgtgaggttccccaacatcaccaacctgtgccccttcggcgaggtgttcaacgccaccaggttcgccagcgtgtacgcctggaacaggaagaggatcagcaactgcgtggccgactacagcgtgctgtacaacagcgccagcttcagcaccttcaagtgctacggcgtgagccccaccaagctgaacgacctgtgcttcaccaacgtgtacgccgacagcttcgtgatcaggggcgacgaggtgaggcagatcgcccccggccagaccggcaagatcgccgactacaactacaagctgcccgacgacttcaccggctgcgtgatcgcctggaacagcaacaacctggacagcaaggtgggcggcaactacaactacctgtacaggctgttcaggaagagcaacctgaagcccttcgagagggacatcagcaccgagatctaccaggccggcagcaccccctgcaacggcgtggagggcttcaactgctacttccccctgcagagctacggcttccagcccaccaacggcgtgggctaccagccctacagggtggtggtgctgagcttcgagctgctgcacgcccccgccaccgtgtgcggccccaagaagagcaccaacctggtgaagaacaagtgcgtgaacttcaacttcaacggcctgaccggcaccggcgtgctgaccgagagcaacaagaagttcctgcccttccagcagttcggcagggacatcgccgacaccaccgacgccgtgagggacccccagaccctggagatcctggacatcaccccctgcagcttcggcggcgtgagcgtgatcacccccggcaccaacaccagcaaccaggtggccgtgctgtaccaggacgtgaactgcaccgaggtgcccgtggccatccacgccgaccagctgacccccacctggagggtgtacagcaccggcagcaacgtgttccagaccagggccggctgcctgatcggcgccgagcacgtgaacaacagctacgagtgcgacatccccatcggcgccggcatctgcgccagctaccagacccagaccaacagccccaggagggccaggagcgtggccagccagagcatcatcgcctacaccatgagcctgggcgccgagaacagcgtggcctacagcaacaacagcatcgccatccccaccaacttcaccatcagcgtgaccaccgagatcctgcccgtgagcatgaccaagaccagcgtggactgcaccatgtacatctgcggcgacagcaccgagtgcagcaacctgctgctgcagtacggcagcttctgcacccagctgaacagggccctgaccggcatcgccgtggagcaggacaagaacacccaggaggtgttcgcccaggtgaagcagatctacaagaccccccccatcaaggacttcggcggcttcaacttcagccagatcctgcccgaccccagcaagcccagcaagaggagcttcatcgaggacctgctgttcaacaaggtgaccctggccgacgccggcttcatcaagcagtacggcgactgcctgggcgacatcgccgccagggacctgatctgcgcccagaagttcaacggcctgaccgtgctgccccccctgctgaccgacgagatgatcgcccagtacaccagcgccctgctggccggcaccatcaccagcggctggaccttcggcgccggcgccgccctgcagatccccttcgccatgcagatggcctacaggttcaacggcatcggcgtgacccagaacgtgctgtacgagaaccagaagctgatcgccaaccagttcaacagcgccatcggcaagatccaggacagcctgagcagcaccgccagcgccctgggcaagctgcaggacgtggtgaaccagaacgcccaggccctgaacaccctggtgaagcagctgagcagcaacttcggcgccatcagcagcgtgctgaacgacatcctgagcaggctggacccccccgaggccgaggtgcagatcgacaggctgatcaccggcaggctgcagagcctgcagacctacgtgacccagcagctgatcagggccgccgagatcagggccagcgccaacctggccgccaccaagatgagcgagtgcgtgctgggccagagcaagagggtggacttctgcggcaagggctaccacctgatgagcttcccccagagcgccccccacggcgtggtgttcctgcacgtgacctacgtgcccgcccaggagaagaacttcaccaccgcccccgccatctgccacgacggcaaggcccacttccccagggagggcgtgttcgtgagcaacggcacccactggttcgtgacccagaggaacttctacgagccccagatcatcaccaccgacaacaccttcgtgagcggcaactgcgacgtggtgatcggcatcgtgaacaacaccgtgtacgaccccctgcagcccgagctggacagcttcaaggaggagctggacaagtacttcaagaaccacaccagccccgacgtggacctgggcgacatcagcggcatcaacgccagcgtggtgaacatccagaaggagatcgacaggctgaacgaggtggccaagaacctgaacgagagcctgatcgacctgcaggagctgggcaagtacgagcagtacatcaagtggccctggtacatctggctgggcttcatcgccggcctgatcgccatcgtgatggtgaccatcatgctgtgctgcatgaccagctgctgcagctgcctgaagggctgctgcagctgcggcagctgctgcaagttcgacgaggacgacagcgagcccgtgctgaagggcgtgaagctgcactacaccggaagcggagccacgaacttctctctgttaaagcaagcaggagatgttgaagaaaaccccgggcctatgaaggcaatactagtagttctgctatatacatttgcaaccgcaaatgcagacacattatgtataggttatcatgcgaacaactcaacagacactgtagacacagtactagaaaagaatgtaacagtaacacactctgttaaccttctagaagacaagcataacgggaaactatgcaaactaagaggggtagccccattgcatttgggtaaatgtaacattgctggctggatcctgggaaatccagagtgtgaatcactctccacagcaagctcatggtcctacattgtggaaacatctagttcagacaatggaacgtgttacccaggagatttcatcgattatgaggagctaagagagcaattgagctcagtgtcatcatttgaaaggtttgagatattccccaagacaagttcatggcccaatcatgactcgaacaaaggtgtaacgacagcatgtcctcatgctggagcaaaaagcttctacaaaaatttaatatggctagttaaaaaaggaaattcatacccaaagctcagcaaatcctacattaatgataaagggaaagaagtcctcgtgctatggggcattcaccatccacctactagtgctgaccaacaaagtctctatcagaatgcagatgcatatgtttttgtggggacatcaagatacagcaagaagttcaagccggaaatagcaataaggcccaaagtgagggatcaagaagggagaatgaactattactggacactagtagagccgggagacaaaataacattcgaagcaactggaaatctagtggtaccgagatatgcattcgcaatggaaagaaatgctggatctggtattatcatttcagatacaccagtccacgattgcaatacaacttgtcagacacccaagggtgctataaacaccagcctcccatttcagaacatacatccgatcacaattggaaaatgtccaaaatatgtaaaaagcacaaaattgagactggccacaggattgaggaatgtcccgtccattcaatctagaggcctatttggggccattgccggtttcattgaaggggggtggacagggatggtagatggatggtacggttatcaccatcaaaatgagcaggggtcaggatatgcagccgacctgaagagcacacagaatgccattgacgagattactaacaaagtaaactctgttattgaaaaaatgaatacacagttcacagcagtaggtaaagagttcaaccacctggaaaaaagaatagagaatttaaataaaaaagttgatgatggtttcctggacatttggacttacaatgccgaactgttggttctattggaaaatgaaagaactttggactaccacgattcaaaggtgaagaacttatatgaaaaggtaagaagccagttaaaaaacaatgccaaggaaattggaaacggctgctttgaattttaccacaaatgtgataacacgtgcatggaaagtgtcaaaaatgggacttatgactacccaaaatactcagaggaagcaaaattaaacagagaagaaatagatggggtaaagctggaatcaacaaggatttaccagattttggcgatctattcaaccgtcgccagttcattggtactggtagtctccctgggggcaatcagtttctggatgtgctctaatgggtctctacagtgtagaatatgtatttaaggaagcggagccacgaacttctctctgttaaagcaagcaggagatgttgaagaaaaccccgggcctagcaaaagcaggggataattctattaaccatgaagactatcattgctttgagctacattctatgtctggttttcgctcaaaaacttcctggaaatgacaatagcactgcaacgctgtgccttgggcaccatgcagtaccaaacggaacgatagtgaaaacaatcacgaatgaccaaattgaagttactaatgctactgagctggttcagaattcctcaataggtgaaatatgcgacagtcctcatcagatccttgatggagaaaactgcacactaatagatgctctattgggagaccctcagtgtgatggctttcaaaataagaaatgggacctttttgttgaacgaagcaaagcctacagcaactgttacccttatgatgtgccggattatgcctcccttaggtcactagttgcctcatccggcacactggagtttaacaatgaaagcttcaattgggctggagtcactcaaaacggaacaagttctgcttgcataaggggatctaatagtagtttctttagtagattaaattggttgacccacttaaacttcaagtacccagcattgaacgtgactatgccaaacaatgaacaatttgacaaattgtacatttggggggttcaccacccgggtacggacaaggaccaaatcttcctgtatgctcaatcatcaggaagaatcacagtatctaccaaaagaagccaacaagctgtaatcccgaatatcggatctagacccagaataaggaatatccctagcagaataagcatctattggacaatagtaaaaccgggagacatacttttgattaacagcacagggaatctaattgctcctaggggttacttcaaaatacgaagtgggaaaagctcaataatgagatcagatgcacccattggcaaatgcaagtctgaatgcatcactccaaatggaagcattcccaatgacaaaccattccaaaatgtaaacaggatcacatacggggcctgtcccagatatgttaagcaaagcactctgaaattggcaacaggaatgcgaaatgtaccagagaaacaaactagaggcatatttggcgcaatagcgggtttcatagaaaatggttgggagggaatggtggatggttggtacggtttcaggcatcaaaattctgagggaagaggacaagcagcagatctcaaaagcactcaagcagcaatcgatcaaatcaatgggaagctgaatcgattgatcgggaaaaccaacgagaaattccatcagattgagaaagaattctcagaagtagaagggagaattcaggaccttgagaaatatgttgaggacacaaaaatagatctctggtcatacaacgcagagcttcttgttgccctggaaaaccaacatacaattgatctaactgactcagaaatgaacaaactgtttgaaaaaacaaagaagcaactgagggaaaatgctgaggatatgggcaatggttgtttcaaaatataccacaaatgtgacaatgcctgcataggatcaatcagaaatggaacttatgaccacgatgtatacagggatgaagcattaaacaaccggttccagatcaagggagttgagctgaagtcagggtacaaagattggatcctatggatttcctttgccatatcatgttttttgctttgtgttgctttgttggggttcatcatgtgggcctgccaaaagggcaacattaggtgcaacatttgcatttgagtgcattaattaaaaacacccttgtttctactggaagcggagccacgaacttctctctgttaaagcaagcaggagatgttgaagaaaaccccgggcctattttctaatatccacaaaatgaaggcaataattgtactactcatggtagtaacatccaatgcagatcgaatctgcactgggataacatcgtcaaactcaccacatgtcgtcaaaactgctactcaaggggaggtcaacgtgaccggtgtaataccactgacaacaacacccaccaaatctcattttgcaaatctcaaaggaacagaaaccagggggaaactatgcccaaaatgcctcaactgcacagatctggatgtagccttgggcagaccaaaatgcacagggaaaataccctctgcaagggtttcaatactccatgaagtcagacctgttacatctgggtgctttcctataatgcacgatagaacaaaaattagacagctgcctaaccttctccgaggatacgaacatgtcaggttatcaactcacaacgttatcaatgcaaaagatgcaccaggaagaccctacgaaattggaacctcagggtcttgccctaacattaccaatggaaacggattcttcgcaacaatggcttgggccgtcccaaaaaacaaaacagcaacaaatccattaacaatagaagtaccatacatttgtacagaaggagaagaccaaattaccgtttgggggttccactctgacaacgagacccaaatggcaaagctctatggggactcaaagccccagaagttcacctcatctgccaacggagtgaccacacattacgtttcacagattggtggcttcccaaatcaaacagaagacggaggactaccacaaagtggcagaattgttgttgattacatggtgcagaaatctggaaaaacaggaacaattacctatcaaagaggtattttattgcctcaaaaagtgtggtgcgcaagtggcaggagcaaggtaataaaaggatccttgcccttaattggagaagcagattgcctccatgaaaaatacggtggattaaacaaaagcaagccttactacacaggggaacatgcaaaggccataggaaattgcccaatatgggtgaaaacacccttgaagctggccaatggaaccaaatatagaccccctgcaaaactattaaaggaaagaggtttcttcggagccattgctggtttcttagagggaggatgggaaggaatgattgcaggttggcacggatacacatcccatggggcacatggagtagcggtggcagctgaccttaagagcactcaagaggccataaacaagataacaaaaaatctcaactctttgagtgagctggaagtaaagaatcttcaaagactaagcggtgccatggatgaactccacaacgaaatactagaactagatgagaaagtggatgatctcagagctgacacaataagctcacaaatagaactcgcagtcctgctttccaatgaaggaataataaacagtgaagatgaacatctcttggcgcttgaaagaaagctgaagaaaatgctgggcccctctgctgtagagatagggaatggatgctttgaaaccaaacacaagtgcaaccagacctgcctcgacagaatagctgctggtacctttgatgcaggagaattttctctccccacctttgattcactgaatattactgctgcatctttaaatgacgacggattggacaatcatactatactgctttactactcaactgctgcctccagtttggctgtaacactgatgatagctatctttgttgtttatatggtctccagagacaatgtttcttgctccatttgtctataaggaaagttaagccctgtattttcctttattgtagtgcttgtttgcttgttgtcattacaaagaaacgttattgaaaaatggaagcggagccacgaacttctctctgttaaagcaagcaggagatgttgaagaaaaccccgggcctttcggagctattgctggtttcttggaaggaggatgggaaggaatgattgcaggttggcacggatacacatctcatggagcacatggagtagcagtggcagcagaccttaagagtacccatgatgactcgagctggtactgcatgcacgcaatgctagctgcccctttcccgtcctgggtaccccgagtctcccccgacctcgggtcccaggtatgctcccacctccacctgccccactcaccacctctgctagttccagacacctcccaagcacgcagcaatgcagctcaaaacgcttagcctagccacacccccacgggaaacagcagtgattaacctttagcaataaacgaaagtttaactaagctatactaaccccagggttggtcaatttcgtgccagccacaccctggagctagcaaaaaaaa

SEQ ID NO: 401 - DNA, 11608 bp, synthetic construct
  source 1..11608: mol_type = other DNA; note = Hybrid Vaccine Candidate 13
ctcgacattgattattgactagttattaatagtaatcaattacggggtcattagttcatagcccatatatggagttccgcgttacataacttacggtaaatggcccgcctggctgaccgcccaacgacccccgcccattgacgtcaataatgacgtatgttcccatagtaacgccaatagggactttccattgacgtcaatgggtggagtatttacggtaaactgcccacttggcagtacatcaagtgtatcatatgccaagtacgccccctattgacgtcaatgacggtaaatggcccgcctggcattatgcccagtacatgaccttatgggactttcctacttggcagtacatctacgtattagtcatcgctattaccatggtcgaggtgagccccacgttctgcttcactctccccatctcccccccctccccacccccaattttgtatttatttattttttaattattttgtgcagcgatgggggcggggggggggggggggcgcgcgccaggcggggcggggcggggcgaggggcggggcggggcgaggcggagaggtgcggcggcagccaatcagagcggcgcgctccgaaagtttccttttatggcgaggcggcggcggcggcggccctataaaaagcgaagcgcgcggcgggcgggagtcgctgcgcgctgccttcgccccgtgccccgctccgccgccgcctcgcgccgcccgccccggctctgactgaccgcgttactcccacaggtgagcgggcgggacggcccttctcctccgggctgtaattagcgcttggtttaatgacggcttgtttcttttctgtggctgcgtgaaagccttgaggggctccgggagggccctttgtgcggggggagcggctcggggggtgcgtgcgtgtgtgtgtgcgtggggagcgccgcgtgcggctccgcgctgcccggcggctgtgagcgctgcgggcgcggcgcggggctttgtgcgctccgcagtgtgcgcgaggggagcgcggccgggggcggtgccccgcggtgcggggggggctgcgaggggaacaaaggctgcgtgcggggtgtgtgcgtgggggggtgagcagggggtgtgggcgcgtcggtcgggctgcaaccccccctgcacccccctccccgagttgctgagcacggcccggcttcgggtgcggggctccgtacggggcgtggcgcggggctcgccgtgccgggcggggggtggcggcaggtgggggtgccgggcggggcggggccgcctcgggccggggagggctcgggggaggggcgcggcggcccccggagcgccggcggctgtcgaggcgcggcgagccgcagccattgccttttatggtaatcgtgcgagagggcgcagggacttcctttgtcccaaatctgtgcggagccgaaatctgggaggcgccgccgcaccccctctagcgggcgcggggcgaagcggtgcggcgccggcaggaaggaaatgggcggggagggccttcgtgcgtcgccgcgccgccgtccccttctccctctccagcctcggggctgtccgcggggggacggctgccttcgggggggacggggcagggcggggttcggcttctggcgtgtgaccggcggctctagagcctctgctaaccatgttcatgccttcttctttttcctacagctcctgggcaacgtgctggttattgtgctgtctcatcattttggcaaagaattggagaataaactagtattcttctggtccccacagactcagagagaacccgccaccatgttcgtgttcctggtgctgctgcccctggtgagcagccagtgcgtgaacctgaccaccaggacccagctgccccccgcctacaccaacagcttcaccaggggcgtgtactaccccgacaaggtgttcaggagcagcgtgctgcacagcacccaggacctgttcctgcccttcttcagcaacgtgacctggttccacgccatccacgtgagcggcaccaacggcaccaagaggttcgacaaccccgtgctgcccttcaacgacggcgtgtacttcgccagcaccgagaagagcaacatcatcaggggctggatcttcggcaccaccctggacagcaagacccagagcctgctgatcgtgaacaacgccaccaacgtggtgatcaaggtgtgcgagttccagttctgcaacgaccccttcctgggcgtgtactaccacaagaacaacaagagctggatggagagcgagttcagggtgtacagcagcgccaacaactgcaccttcgagtacgtgagccagcccttcctgatggacctggagggcaagcagggcaacttcaagaacctgagggagttcgtgttcaagaacatcgacggctacttcaagatctacagcaagcacacccccatcaacctggtgagggacctgccccagggcttcagcgccctggagcccctggtggacctgcccatcggcatcaacatcaccaggttccagaccctgctggccctgcacaggagctacctgacccccggcgacagcagcagcggctggaccgccggcgccgccgcctactacgtgggctacctgcagcccaggaccttcctgctgaagtacaacgagaacggcaccatcaccgacgccgtggactgcgccctggaccccctgagcgagaccaagtgcaccctgaagagcttcaccgtggagaagggcatctaccagaccagcaacttcagggtgcagcccaccgagagcatcgtgaggttccccaacatcaccaacctgtgccccttcggcgaggtgttcaacgccaccaggttcgccagcgtgtacgcctggaacaggaagaggatcagcaactgcgtggccgactacagcgtgctgtacaacagcgccagcttcagcaccttcaagtgctacggcgtgagccccaccaagctgaacgacctgtgcttcaccaacgtgtacgccgacagcttcgtgatcaggggcgacgaggtgaggcagatcgcccccggccagaccggcaagatcgccgactacaactacaagctgcccgacgacttcaccggctgcgtgatcgcctggaacagcaacaacctggacagcaaggtgggcggcaactacaactacctgtacaggctgttcaggaagagcaacctgaagcccttcgagagggacatcagcaccgagatctaccaggccggcagcaccccctgcaacggcgtggagggcttcaactgctacttccccctgcagagctacggcttccagcccaccaacggcgtgggctaccagccctacagggtggtggtgctgagcttcgagctgctgcacgcccccgccaccgtgtgcggccccaagaagagcaccaacctggtgaagaacaagtgcgtgaacttcaacttcaacggcctgaccggcaccggcgtgctgaccgagagcaacaagaagttcctgcccttccagcagttcggcagggacatcgccgacaccaccgacgccgtgagggacccccagaccctggagatcctggacatcaccccctgcagcttcggcggcgtgagcgtgatcacccccggcaccaacaccagcaaccaggtggccgtgctgtaccaggacgtgaactgcaccgaggtgcccgtggccatccacgccgaccagctgacccccacctggagggtgtacagcaccggcagcaacgtgttccagaccagggccggctgcctgatcggcgccgagcacgtgaacaacagctacgagtgcgacatccccatcggcgccggcatctgcgccagctaccagacccagaccaacagccccggcagcgccagcagcgtggccagccagagcatcatcgcctacaccatgagcctgggcgccgagaacagcgtggcctacagcaacaacagcatcgccatccccaccaacttcaccatcagcgtgaccaccgagatcctgcccgtgagcatgaccaagaccagcgtggactgcaccatgtacatctgcggcgacagcaccgagtgcagcaacctgctgctgcagtacggcagcttctgcacccagctgaacagggccctgaccggcatcgccgtggagcaggacaagaacacccaggaggtgttcgcccaggtgaagcagatctacaagaccccccccatcaaggacttcggcggcttcaacttcagccagatcctgcccgaccccagcaagcccagcaagaggagccccatcgaggacctgctgttcaacaaggtgaccctggccgacgccggcttcatcaagcagtacggcgactgcctgggcgacatcgccgccagggacctgatctgcgcccagaagttcaacggcctgaccgtgctgccccccctgctgaccgacgagatgatcgcccagtacaccagcgccctgctggccggcaccatcaccagcggctggaccttcggcgccggccccgccctgcagatccccttccccatgcagatggcctacaggttcaacggcatcggcgtgacccagaacgtgctgtacgagaaccagaagctgatcgccaaccagttcaacagcgccatcggcaagatccaggacagcctgagcagcacccccagcgccctgggcaagctgcaggacgtggtgaaccagaacgcccaggccctgaacaccctggtgaagcagctgagcagcaacttcggcgccatcagcagcgtgctgaacgacatcctgagcaggctggacccccccgaggccgaggtgcagatcgacaggctgatcaccggcaggctgcagagcctgcagacctacgtgacccagcagctgatcagggccgccgagatcagggccagcgccaacctggccgccaccaagatgagcgagtgcgtgctgggccagagcaagagggtggacttctgcggcaagggctaccacctgatgagcttcccccagagcgccccccacggcgtggtgttcctgcacgtgacctacgtgcccgcccaggagaagaacttcaccaccgcccccgccatctgccacgacggcaaggcccacttccccagggagggcgtgttcgtgagcaacggcacccactggttcgtgacccagaggaacttctacgagccccagatcatcaccaccgacaacaccttcgtgagcggcaactgcgacgtggtgatcggcatcgtgaacaacaccgtgtacgaccccctgcagcccgagctggacagcttcaaggaggagctggacaagtacttcaagaaccacaccagccccgacgtggacctgggcgacatcagcggcatcaacgccagcgtggtgaacatccagaaggagatcgacaggctgaacgaggtggccaagaacctgaacgagagcctgatcgacctgcaggagctgggcaagtacgagcagtacatcaagtggccctggtacatctggctgggcttcatcgccggcctgatcgccatcgtgatggtgaccatcatgctgtgctgcatgaccagctgctgcagctgcctgaagggctgctgcagctgcggcagctgctgcaagttcgacgaggacgacagcgagcccgtgctgaagggcgtgaagctgcactacaccggaagcggagccacgaacttctctctgttaaagcaagcaggagatgttgaagaaaaccccgggcctatgaaggcaatactagtagttctgctatatacatttgcaaccgcaaatgcagacacattatgtataggttatcatgcgaacaactcaacagacactgtagacacagtactagaaaagaatgtaacagtaacacactctgttaaccttctagaagacaagcataacgggaaactatgcaaactaagaggggtagccccattgcatttgggtaaatgtaacattgctggctggatcctgggaaatccagagtgtgaatcactctccacagcaagctcatggtcctacattgtggaaacatctagttcagacaatggaacgtgttacccaggagatttcatcgattatgaggagctaagagagcaattgagctcagtgtcatcatttgaaaggtttgagatattccccaagacaagttcatggcccaatcatgactcgaacaaaggtgtaacgacagcatgtcctcatgctggagcaaaaagcttctacaaaaatttaatatggctagttaaaaaaggaaattcatacccaaagctcagcaaatcctacattaatgataaagggaaagaagtcctcgtgctatggggcattcaccatccacctactagtgctgaccaacaaagtctctatcagaatgcagatgcatatgtttttgtggggacatcaagatacagcaagaagttcaagccggaaatagcaataaggcccaaagtgagggatcaagaagggagaatgaactattactggacactagtagagccgggagacaaaataacattcgaagcaactggaaatctagtggtaccgagatatgcattcgcaatggaaagaaatgctggatctggtattatcatttcagatacaccagtccacgattgcaatacaacttgtcagacacccaagggtgctataaacaccagcctcccatttcagaacatacatccgatcacaattggaaaatgtccaaaatatgtaaaaagcacaaaattgagactggccacaggattgaggaatgtcccgtccattcaatctagaggcctatttggggccattgccggtttcattgaaggggggtggacagggatggtagatggatggtacggttatcaccatcaaaatgagcaggggtcaggatatgcagccgacctgaagagcacacagaatgccattgacgagattactaacaaagtaaactctgttattgaaaaaatgaatacacagttcacagcagtaggtaaagagttcaaccacctggaaaaaagaatagagaatttaaataaaaaagttgatgatggtttcctggacatttggacttacaatgccgaactgttggttctattggaaaatgaaagaactttggactaccacgattcaaaggtgaagaacttatatgaaaaggtaagaagccagttaaaaaacaatgccaaggaaattggaaacggctgctttgaattttaccacaaatgtgataacacgtgcatggaaagtgtcaaaaatgggacttatgactacccaaaatactcagaggaagcaaaattaaacagagaagaaatagatggggtaaagctggaatcaacaaggatttaccagattttggcgatctattcaaccgtcgccagttcattggtactggtagtctccctgggggcaatcagtttctggatgtgctctaatgggtctctacagtgtagaatatgtatttaaggaagcggagccacgaacttctctctgttaaagcaagcaggagatgttgaagaaaaccccgggcctagcaaaagcaggggataattctattaaccatgaagactatcattgctttgagctacattctatgtctggttttcgctcaaaaacttcctggaaatgacaatagcactgcaacgctgtgccttgggcaccatgcagtaccaaacggaacgatagtgaaaacaatcacgaatgaccaaattgaagttactaatgctactgagctggttcagaattcctcaataggtgaaatatgcgacagtcctcatcagatccttgatggagaaaactgcacactaatagatgctctattgggagaccctcagtgtgatggctttcaaaataagaaatgggacctttttgttgaacgaagcaaagcctacagcaactgttacccttatgatgtgccggattatgcctcccttaggtcactagttgcctcatccggcacactggagtttaacaatgaaagcttcaattgggctggagtcactcaaaacggaacaagttctgcttgcataaggggatctaatagtagtttctttagtagattaaattggttgacccacttaaacttcaagtacccagcattgaacgtgactatgccaaacaatgaacaatttgacaaattgtacatttggggggttcaccacccgggtacggacaaggaccaaatcttcctgtatgctcaatcatcaggaagaatcacagtatctaccaaaagaagccaacaagctgtaatcccgaatatcggatctagacccagaataaggaatatccctagcagaataagcatctattggacaatagtaaaaccgggagacatacttttgattaacagcacagggaatctaattgctcctaggggttacttcaaaatacgaagtgggaaaagctcaataatgagatcagatgcacccattggcaaatgcaagtctgaatgcatcactccaaatggaagcattcccaatgacaaaccattccaaaatgtaaacaggatcacatacggggcctgtcccagatatgttaagcaaagcactctgaaattggcaacaggaatgcgaaatgtaccagagaaacaaactagaggcatatttggcgcaatagcgggtttcatagaaaatggttgggagggaatggtggatggttggtacggtttcaggcatcaaaattctgagggaagaggacaagcagcagatctcaaaagcactcaagcagcaatcgatcaaatcaatgggaagctgaatcgattgatcgggaaaaccaacgagaaattccatcagattgagaaagaattctcagaagtagaagggagaattcaggaccttgagaaatatgttgaggacacaaaaatagatctctggtcatacaacgcagagcttcttgttgccctggaaaaccaacatacaattgatctaactgactcagaaatgaacaaactgtttgaaaaaacaaagaagcaactgagggaaaatgctgaggatatgggcaatggttgtttcaaaatataccacaaatgtgacaatgcctgcataggatcaatcagaaatggaacttatgaccacgatgtatacagggatgaagcattaaacaaccggttccagatcaagggagttgagctgaagtcagggtacaaagattggatcctatggatttcctttgccatatcatgttttttgctttgtgttgctttgttggggttcatcatgtgggcctgccaaaagggcaacattaggtgcaacatttgcatttgagtgcattaattaaaaacacccttgtttctactggaagcggagccacgaacttctctctgttaaagcaagcaggagatgttgaagaaaaccccgggcctattttctaatatccacaaaatgaaggcaataattgtactactcatggtagtaacatccaatgcagatcgaatctgcactgggataacatcgtcaaactcaccacatgtcgtcaaaactgctactcaaggggaggtcaacgtgaccggtgtaataccactgacaacaacacccaccaaatctcattttgcaaatctcaaaggaacagaaaccagggggaaactatgcccaaaatgcctcaactgcacagatctggatgtagccttgggcagaccaaaatgcacagggaaaataccctctgcaagggtttcaatactccatgaagtcagacctgttacatctgggtgctttcctataatgcacgatagaacaaaaattagacagctgcctaaccttctccgaggatacgaacatgtcaggttatcaactcacaacgttatcaatgcaaaagatgcaccaggaagaccctacgaaattggaacctcagggtcttgccctaacattaccaatggaaacggattcttcgcaacaatggcttgggccgtcccaaaaaacaaaacagcaacaaatccattaacaatagaagtaccatacatttgtacagaaggagaagaccaaattaccgtttgggggttccactctgacaacgagacccaaatggcaaagctctatggggactcaaagccccagaagttcacctcatctgccaacggagtgaccacacattacgtttcacagattggtggcttcccaaatcaaacagaagacggaggactaccacaaagtggcagaattgttgttgattacatggtgcagaaatctggaaaaacaggaacaattacctatcaaagaggtattttattgcctcaaaaagtgtggtgcgcaagtggcaggagcaaggtaataaaaggatccttgcccttaattggagaagcagattgcctccatgaaaaatacggtggattaaacaaaagcaagccttactacacaggggaacatgcaaaggccataggaaattgcccaatatgggtgaaaacacccttgaagctggccaatggaaccaaatatagaccccctgcaaaactattaaaggaaagaggtttcttcggagccattgctggtttcttagagggaggatgggaaggaatgattgcaggttggcacggatacacatcccatggggcacatggagtagcggtggcagctgaccttaagagcactcaagaggccataaacaagataacaaaaaatctcaactctttgagtgagctggaagtaaagaatcttcaaagactaagcggtgccatggatgaactccacaacgaaatactagaactagatgagaaagtggatgatctcagagctgacacaataagctcacaaatagaactcgcagtcctgctttccaatgaaggaataataaacagtgaagatgaacatctcttggcgcttgaaagaaagctgaagaaaatgctgggcccctctgctgtagagatagggaatggatgctttgaaaccaaacacaagtgcaaccagacctgcctcgacagaatagctgctggtacctttgatgcaggagaattttctctccccacctttgattcactgaatattactgctgcatctttaaatgacgacggattggacaatcatactatactgctttactactcaactgctgcctccagtttggctgtaacactgatgatagctatctttgttgtttatatggtctccagagacaatgtttcttgctccatttgtctataaggaaagttaagccctgtattttcctttattgtagtgcttgtttgcttgttgtcattacaaagaaacgttattgaaaaatggaagcggagccacgaacttctctctgttaaagcaagcaggagatgttgaagaaaaccccgggcctttcggagctattgctggtttcttggaaggaggatgggaaggaatgattgcaggttggcacggatacacatctcatggagcacatggagtagcagtggcagcagaccttaagagtacccatgatgactcgagctggtactgcatgcacgcaatgctagctgcccctttcccgtcctgggtaccccgagtctcccccgacctcgggtcccaggtatgctcccacctccacctgccccactcaccacctctgctagttccagacacctcccaagcacgcagcaatgcagctcaaaacgcttagcctagccacacccccacgggaaacagcagtgattaacctttagcaataaacgaaagtttaactaagctatactaaccccagggttggtcaatttcgtgccagccacaccctggagctagcaaaaaaaa

SEQ ID NO: 402 - DNA, 11608 bp, synthetic construct
  source 1..11608: mol_type = other DNA; note = Hybrid Vaccine Candidate 14
ctcgacattgattattgactagttattaatagtaatcaattacggggtcattagttcatagcccatatatggagttccgcgttacataacttacggtaaatggcccgcctggctgaccgcccaacgacccccgcccattgacgtcaataatgacgtatgttcccatagtaacgccaatagggactttccattgacgtcaatgggtggagtatttacggtaaactgcccacttggcagtacatcaagtgtatcatatgccaagtacgccccctattgacgtcaatgacggtaaatggcccgcctggcattatgcccagtacatgaccttatgggactttcctacttggcagtacatctacgtattagtcatcgctattaccatggtcgaggtgagccccacgttctgcttcactctccccatctcccccccctccccacccccaattttgtatttatttattttttaattattttgtgcagcgatgggggcggggggggggggggggcgcgcgccaggcggggcggggcggggcgaggggcggggcggggcgaggcggagaggtgcggcggcagccaatcagagcggcgcgctccgaaagtttccttttatggcgaggcggcggcggcggcggccctataaaaagcgaagcgcgcggcgggcgggagtcgctgcgcgctgccttcgccccgtgccccgctccgccgccgcctcgcgccgcccgccccggctctgactgaccgcgttactcccacaggtgagcgggcgggacggcccttctcctccgggctgtaattagcgcttggtttaatgacggcttgtttcttttctgtggctgcgtgaaagccttgaggggctccgggagggccctttgtgcggggggagcggctcggggggtgcgtgcgtgtgtgtgtgcgtggggagcgccgcgtgcggctccgcgctgcccggcggctgtgagcgctgcgggcgcggcgcggggctttgtgcgctccgcagtgtgcgcgaggggagcgcggccgggggcggtgccccgcggtgcggggggggctgcgaggggaacaaaggctgcgtgcggggtgtgtgcgtgggggggtgagcagggggtgtgggcgcgtcggtcgggctgcaaccccccctgcacccccctccccgagttgctgagcacggcccggcttcgggtgcggggctccgtacggggcgtggcgcggggctcgccgtgccgggcggggggtggcggcaggtgggggtgccgggcggggcggggccgcctcgggccggggagggctcgggggaggggcgcggcggcccccggagcgccggcggctgtcgaggcgcggcgagccgcagccattgccttttatggtaatcgtgcgagagggcgcagggacttcctttgtcccaaatctgtgcggagccgaaatctgggaggcgccgccgcaccccctctagcgggcgcggggcgaagcggtgcggcgccggcaggaaggaaatgggcggggagggccttcgtgcgtcgccgcgccgccgtccccttctccctctccagcctcggggctgtccgcggggggacggctgccttcgggggggacggggcagggcggggttcggcttctggcgtgtgaccggcggctctagagcctctgctaaccatgttcatgccttcttctttttcctacagctcctgggcaacgtgctggttattgtgctgtctcatcattttggcaaagaattggagaataaactagtattcttctggtccccacagactcagagagaacccgccaccatgttcgtgttcctggtgctgctgcccctggtgagcagccagtgcgtgaacctgaccaccaggacccagctgccccccgcctacaccaacagcttcaccaggggcgtgtactaccccgacaaggtgttcaggagcagcgtgctgcacagcacccaggacctgttcctgcccttcttcagcaacgtgacctggttccacgccatccacgtgagcggcaccaacggcaccaagaggttcgacaaccccgtgctgcccttcaacgacggcgtgtacttcgccagcaccgagaagagcaacatcatcaggggctggatcttcggcaccaccctggacagcaagacccagagcctgctgatcgtgaacaacgccaccaacgtggtgatcaaggtgtgcgagttccagttctgcaacgaccccttcctgggcgtgtactaccacaagaacaacaagagctggatggagagcgagttcagggtgtacagcagcgccaacaactgcaccttcgagtacgtgagccagcccttcctgatggacctggagggcaagcagggcaacttcaagaacctgagggagttcgtgttcaagaacatcgacggctacttcaagatctacagcaagcacacccccatcaacctggtgagggacctgccccagggcttcagcgccctggagcccctggtggacctgcccatcggcatcaacatcaccaggttccagaccctgctggccctgcacaggagctacctgacccccggcgacagcagcagcggctggaccgccggcgccgccgcctactacgtgggctacctgcagcccaggaccttcctgctgaagtacaacgagaacggcaccatcaccgacgccgtggactgcgccctggaccccctgagcgagaccaagtgcaccctgaagagcttcaccgtggagaagggcatctaccagaccagcaacttcagggtgcagcccaccgagagcatcgtgaggttccccaacatcaccaacctgtgccccttcggcgaggtgttcaacgccaccaggttcgccagcgtgtacgcctggaacaggaagaggatcagcaactgcgtggccgactacagcgtgctgtacaacagcgccagcttcagcaccttcaagtgctacggcgtgagccccaccaagctgaacgacctgtgcttcaccaacgtgtacgccgacagcttcgtgatcaggggcgacgaggtgaggcagatcgcccccggccagaccggcaagatcgccgactacaactacaagctgcccgacgacttcaccggctgcgtgatcgcctggaacagcaacaacctggacagcaaggtgggcggcaactacaactacctgtacaggctgttcaggaagagcaacctgaagcccttcgagagggacatcagcaccgagatctaccaggccggcagcaccccctgcaacggcgtggagggcttcaactgctacttccccctgcagagctacggcttccagcccaccaacggcgtgggctaccagccctacagggtggtggtgctgagcttcgagctgctgcacgcccccgccaccgtgtgcggccccaagaagagcaccaacctggtgaagaacaagtgcgtgaacttcaacttcaacggcctgaccggcaccggcgtgctgaccgagagcaacaagaagttcctgcccttccagcagttcggcagggacatcgccgacaccaccgacgccgtgagggacccccagaccctggagatcctggacatcaccccctgcagcttcggcggcgtgagcgtgatcacccccggcaccaacaccagcaaccaggtggccgtgctgtaccaggacgtgaactgcaccgaggtgcccgtggccatccacgccgaccagctgacccccacctggagggtgtacagcaccggcagcaacgtgttccagaccagggccggctgcctgatcggcgccgagcacgtgaacaacagctacgagtgcgacatccccatcggcgccggcatctgcgccagctaccagacccagaccaacagccccaggagggccaggagcgtggccagccagagcatcatcgcctacaccatgagcctgggcgccgagaacagcgtggcctacagcaacaacagcatcgccatccccaccaacttcaccatcagcgtgaccaccgagatcctgcccgtgagcatgaccaagaccagcgtggactgcaccatgtacatctgcggcgacagcaccgagtgcagcaacctgctgctgcagtacggcagcttctgcacccagctgaacagggccctgaccggcatcgccgtggagcaggacaagaacacccaggaggtgttcgcccaggtgaagcagatctacaagaccccccccatcaaggacttcggcggcttcaacttcagccagatcctgcccgaccccagcaagcccagcaagaggagcttcatcgaggacctgctgttcaacaaggtgaccctggccgacgccggcttcatcaagcagtacggcgactgcctgggcgacatcgccgccagggacctgatctgcgcccagaagttcaacggcctgaccgtgctgccccccctgctgaccgacgagatgatcgcccagtacaccagcgccctgctggccggcaccatcaccagcggctggaccttcggcgccggcgccgccctgcagatccccttcgccatgcagatggcctacaggttcaacggcatcggcgtgacccagaacgtgctgtacgagaaccagaagctgatcgccaaccagttcaacagcgccatcggcaagatccaggacagcctgagcagcaccgccagcgccctgggcaagctgcaggacgtggtgaaccagaacgcccaggccctgaacaccctggtgaagcagctgagcagcaacttcggcgccatcagcagcgtgctgaacgacatcctgagcaggctggacccccccgaggccgaggtgcagatcgacaggctgatcaccggcaggctgcagagcctgcagacctacgtgacccagcagctgatcagggccgccgagatcagggccagcgccaacctggccgccaccaagatgagcgagtgcgtgctgggccagagcaagagggtggacttctgcggcaagggctaccacctgatgagcttcccccagagcgccccccacggcgtggtgttcctgcacgtgacctacgtgcccgcccaggagaagaacttcaccaccgcccccgccatctgccacgacggcaaggcccacttccccagggagggcgtgttcgtgagcaacggcacccactggttcgtgacccagaggaacttctacgagccccagatcatcaccaccgacaacaccttcgtgagcggcaactgcgacgtggtgatcggcatcgtgaacaacaccgtgtacgaccccctgcagcccgagctggacagcttcaaggaggagctggacaagtacttcaagaaccacaccagccccgacgtggacctgggcgacatcagcggcatcaacgccagcgtggtgaacatccagaaggagatcgacaggctgaacgaggtggccaagaacctgaacgagagcctgatcgacctgcaggagctgggcaagtacgagcagtacatcaagtggccctggtacatctggctgggcttcatcgccggcctgatcgccatcgtgatggtgaccatcatgctgtgctgcatgaccagctgctgcagctgcctgaagggctgctgcagctgcggcagctgctgcaagttcgacgaggacgacagcgagcccgtgctgaagggcgtgaagctgcactacaccggaagcggagccacgaacttctctctgttaaagcaagcaggagatgttgaagaaaaccccgggcctatgaaggcaatactagtagttctgctatatacatttgcaaccgcaaatgcagacacattatgtataggttatcatgcgaacaactcaacagacactgtagacacagtactagaaaagaatgtaacagtaacacactctgttaaccttctagaagacaagcataacgggaaactatgcaaactaagaggggtagccccattgcatttgggtaaatgtaacattgctggctggatcctgggaaatccagagtgtgaatcactctccacagcaagctcatggtcctacattgtggaaacatctagttcagacaatggaacgtgttacccaggagatttcatcgattatgaggagctaagagagcaattgagctcagtgtcatcatttgaaaggtttgagatattccccaagacaagttcatggcccaatcatgactcgaacaaaggtgtaacgacagcatgtcctcatgctggagcaaaaagcttctacaaaaatttaatatggctagttaaaaaaggaaattcatacccaaagctcagcaaatcctacattaatgataaagggaaagaagtcctcgtgctatggggcattcaccatccacctactagtgctgaccaacaaagtctctatcagaatgcagatgcatatgtttttgtggggacatcaagatacagcaagaagttcaagccggaaatagcaataaggcccaaagtgagggatcaagaagggagaatgaactattactggacactagtagagccgggagacaaaataacattcgaagcaactggaaatctagtggtaccgagatatgcattcgcaatggaaagaaatgctggatctggtattatcatttcagatacaccagtccacgattgcaatacaacttgtcagacacccaagggtgctataaacaccagcctcccatttcagaacatacatccgatcacaattggaaaatgtccaaaatatgtaaaaagcacaaaattgagactggccacaggattgaggaatgtcccgtccattcaatctagaggcctatttggggccattgccggtttcattgaaggggggtggacagggatggtagatggatggtacggttatcaccatcaaaatgagcaggggtcaggatatgcagccgacctgaagagcacacagaatgccattgacgagattactaacaaagtaaactctgttattgaaaaaatgaatacacagttcacagcagtaggtaaagagttcaaccacctggaaaaaagaatagagaatttaaataaaaaagttgatgatggtttcctggacatttggacttacaatgccgaactgttggttctattggaaaatgaaagaactttggactaccacgattcaaaggtgaagaacttatatgaaaaggtaagaagccagttaaaaaacaatgccaaggaaattggaaacggctgctttgaattttaccacaaatgtgataacacgtgcatggaaagtgtcaaaaatgggacttatgactacccaaaatactcagaggaagcaaaattaaacagagaagaaatagatggggtaaagctggaatcaacaaggatttaccagattttggcgatctattcaaccgtcgccagttcattggtactggtagtctccctgggggcaatcagtttctggatgtgctctaatgggtctctacagtgtagaatatgtatttaaggaagcggagccacgaacttctctctgttaaagcaagcaggagatgttgaagaaaaccccgggcctagcaaaagcaggggataattctattaaccatgaagactatcattgctttgagctacattctatgtctggttttcgctcaaaaacttcctggaaatgacaatagcactgcaacgctgtgccttgggcaccatgcagtaccaaacggaacgatagtgaaaacaatcacgaatgaccaaattgaagttactaatgctactgagctggttcagaattcctcaataggtgaaatatgcgacagtcctcatcagatccttgatggagaaaactgcacactaatagatgctctattgggagaccctcagtgtgatggctttcaaaataagaaatgggacctttttgttgaacgaagcaaagcctacagcaactgttacccttatgatgtgccggattatgcctcccttaggtcactagttgcctcatccggcacactggagtttaacaatgaaagcttcaattgggctggagtcactcaaaacggaacaagttctgcttgcataaggggatctaatagtagtttctttagtagattaaattggttgacccacttaaacttcaagtacccagcattgaacgtgactatgccaaacaatgaacaatttgacaaattgtacatttggggggttcaccacccgggtacggacaaggaccaaatcttcctgtatgctcaatcatcaggaagaatcacagtatctaccaaaagaagccaacaagctgtaatcccgaatatcggatctagacccagaataaggaatatccctagcagaataagcatctattggacaatagtaaaaccgggagacatacttttgattaacagcacagggaatctaattgctcctaggggttacttcaaaatacgaagtgggaaaagctcaataatgagatcagatgcacccattggcaaatgcaagtctgaatgcatcactccaaatggaagcattcccaatgacaaaccattccaaaatgtaaacaggatcacatacggggcctgtcccagatatgttaagcaaagcactctgaaattggcaacaggaatgcgaaatgtaccagagaaacaaactagaggcatatttggcgcaatagcgggtttcatagaaaatggttgggagggaatggtggatggttggtacggtttcaggcatcaaaattctgagggaagaggacaagcagcagatctcaaaagcactcaagcagcaatcgatcaaatcaatgggaagctgaatcgattgatcgggaaaaccaacgagaaattccatcagattgagaaagaattctcagaagtagaagggagaattcaggaccttgagaaatatgttgaggacacaaaaatagatctctggtcatacaacgcagagcttcttgttgccctggaaaaccaacatacaattgatctaactgactcagaaatgaacaaactgtttgaaaaaacaaagaagcaactgagggaaaatgctgaggatatgggcaatggttgtttcaaaatataccacaaatgtgacaatgcctgcataggatcaatcagaaatggaacttatgaccacgatgtatacagggatgaagcattaaacaaccggttccagatcaagggagttgagctgaagtcagggtacaaagattggatcctatggatttcctttgccatatcatgttttttgctttgtgttgctttgttggggttcatcatgtgggcctgccaaaagggcaacattaggtgcaacatttgcatttgagtgcattaattaaaaacacccttgtttctactggaagcggagccacgaacttctctctgttaaagcaagcaggagatgttgaagaaaaccccgggcctattttctaatatccacaaaatgaaggcaataattgtactactcatggtagtaacatccaatgcagatcgaatctgcactgggataacatcgtcaaactcaccacatgtcgtcaaaactgctactcaaggggaggtcaacgtgaccggtgtaataccactgacaacaacacccaccaaatctcattttgcaaatctcaaaggaacagaaaccagggggaaactatgcccaaaatgcctcaactgcacagatctggatgtagccttgggcagaccaaaatgcacagggaaaataccctctgcaagggtttcaatactccatgaagtcagacctgttacatctgggtgctttcctataatgcacgatagaacaaaaattagacagctgcctaaccttctccgaggatacgaacatgtcaggttatcaactcacaacgttatcaatgcaaaagatgcaccaggaagaccctacgaaattggaacctcagggtcttgccctaacattaccaatggaaacggattcttcgcaacaatggcttgggccgtcccaaaaaacaaaacagcaacaaatccattaacaatagaagtaccatacatttgtacagaaggagaagaccaaattaccgtttgggggttccactctgacaacgagacccaaatggcaaagctctatggggactcaaagccccagaagttcacctcatctgccaacggagtgaccacacattacgtttcacagattggtggcttcccaaatcaaacagaagacggaggactaccacaaagtggcagaattgttgttgattacatggtgcagaaatctggaaaaacaggaacaattacctatcaaagaggtattttattgcctcaaaaagtgtggtgcgcaagtggcaggagcaaggtaataaaaggatccttgcccttaattggagaagcagattgcctccatgaaaaatacggtggattaaacaaaagcaagccttactacacaggggaacatgcaaaggccataggaaattgcccaatatgggtgaaaacacccttgaagctggccaatggaaccaaatatagaccccctgcaaaactattaaaggaaagaggtttcttcggagccattgctggtttcttagagggaggatgggaaggaatgattgcaggttggcacggatacacatcccatggggcacatggagtagcggtggcagctgaccttaagagcactcaagaggccataaacaagataacaaaaaatctcaactctttgagtgagctggaagtaaagaatcttcaaagactaagcggtgccatggatgaactccacaacgaaatactagaactagatgagaaagtggatgatctcagagctgacacaataagctcacaaatagaactcgcagtcctgctttccaatgaaggaataataaacagtgaagatgaacatctcttggcgcttgaaagaaagctgaagaaaatgctgggcccctctgctgtagagatagggaatggatgctttgaaaccaaacacaagtgcaaccagacctgcctcgacagaatagctgctggtacctttgatgcaggagaattttctctccccacctttgattcactgaatattactgctgcatctttaaatgacgacggattggacaatcatactatactgctttactactcaactgctgcctccagtttggctgtaacactgatgatagctatctttgttgtttatatggtctccagagacaatgtttcttgctccatttgtctataaggaaagttaagccctgtattttcctttattgtagtgcttgtttgcttgttgtcattacaaagaaacgttattgaaaaatggaagcggagccacgaacttctctctgttaaagcaagcaggagatgttgaagaaaaccccgggcctttcggagctattgctggtttcttggaaggaggatgggaaggaatgattgcaggttggcacggatacacatctcatggagcacatggagtagcagtggcagcagaccttaagagtacccatgatgactcgagctggtactgcatgcacgcaatgctagctgcccctttcccgtcctgggtaccccgagtctcccccgacctcgggtcccaggtatgctcccacctccacctgccccactcaccacctctgctagttccagacacctcccaagcacgcagcaatgcagctcaaaacgcttagcctagccacacccccacgggaaacagcagtgattaacctttagcaataaacgaaagtttaactaagctatactaaccccagggttggtcaatttcgtgccagccacaccctggagctagcaaaaaaaa

SEQ ID NO: 403 - DNA, 10270 bp, synthetic construct
  source 1..10270: mol_type = other DNA; note = Hybrid Vaccine Candidate 15
tagttattaatagtaatcaattacggggtcattagttcatagcccatatatggagttccgcgttacataacttacggtaaatggcccgcctggctgaccgcccaacgacccccgcccattgacgtcaataatgacgtatgttcccatagtaacgccaatagggactttccattgacgtcaatgggtggagtatttacggtaaactgcccacttggcagtacatcaagtgtatcatatgccaagtacgccccctattgacgtcaatgacggtaaatggcccgcctggcattatgcccagtacatgaccttatgggactttcctacttggcagtacatctacgtattagtcatcgctattaccatggtgatgcggttttggcagtacatcaatgggcgtggatagcggtttgactcacggggatttccaagtctccaccccattgacgtcaatgggagtttgttttggcaccaaaatcaacgggactttccaaaatgtcgtaacaactccgccccattgacgcaaatgggcggtaggcgtgtacggtgggaggtctatataagcagagctggtttagtgaaccgtcagatcgagaataaactagtattcttctggtccccacagactcagagagaacccgccaccatgttcgtgttcctggtgctgctgcccctggtgagcagccagtgcgtgaacctgatcaccaggacccagagctacaccaacagcttcaccaggggcgtgtactaccccgacaaggtgttcaggagcagcgtgctgcacagcacccaggacctgttcctgcccttcttcagcaacgtgacctggttccacgccatccacgtgagcggcaccaacggcaccaagaggttcgacaaccccgtgctgcccttcaacgacggcgtgtacttcgccagcaccgagaagagcaacatcatcaggggctggatcttcggcaccaccctggacagcaagacccagagcctgctgatcgtgaacaacgccaccaacgtggtgatcaaggtgtgcgagttccagttctgcaacgaccccttcctggacgtgtactaccacaagaacaacaagagctggatggagagcgagttcagggtgtacagcagcgccaacaactgcaccttcgagtacgtgagccagcccttcctgatggacctggagggcaagcagggcaacttcaagaacctgagggagttcgtgttcaagaacatcgacggctacttcaagatctacagcaagcacacccccatcaacctgggcagggacctgccccagggcttcagcgccctggagcccctggtggacctgcccatcggcatcaacatcaccaggttccagaccctgctggccctgcacaggagctacctgacccccggcgacagcagcagcggctggaccgccggcgccgccgcctactacgtgggctacctgcagcccaggaccttcctgctgaagtacaacgagaacggcaccatcaccgacgccgtggactgcgccctggaccccctgagcgagaccaagtgcaccctgaagagcttcaccgtggagaagggcatctaccagaccagcaacttcagggtgcagcccaccgagagcatcgtgaggttccccaacatcaccaacctgtgccccttcgacgaggtgttcaacgccaccaggttcgccagcgtgtacgcctggaacaggaagaggatcagcaactgcgtggccgactacagcgtgctgtacaacttcgcccccttcttcgccttcaagtgctacggcgtgagccccaccaagctgaacgacctgtgcttcaccaacgtgtacgccgacagcttcgtgatcaggggcaacgaggtgagccagatcgcccccggccagaccggcaacatcgccgactacaactacaagctgcccgacgacttcaccggctgcgtgatcgcctggaacagcaacaagctggacagcaaggtgggcggcaactacaactacctgtacaggctgttcaggaagagcaacctgaagcccttcgagagggacatcagcaccgagatctaccaggccggcaacaagccctgcaacggcgtggccggcttcaactgctacttccccctgaggagctacggcttcaggcccacctacggcgtgggccaccagccctacagggtggtggtgctgagcttcgagctgctgcacgcccccgccaccgtgtgcggccccaagaagagcaccaacctggtgaagaacaagtgcgtgaacttcaacttcaacggcctgaccggcaccggcgtgctgaccgagagcaacaagaagttcctgcccttccagcagttcggcagggacatcgccgacaccaccgacgccgtgagggacccccagaccctggagatcctggacatcaccccctgcagcttcggcggcgtgagcgtgatcacccccggcaccaacaccagcaaccaggtggccgtgctgtaccagggcgtgaactgcaccgaggtgcccgtggccatccacgccgaccagctgacccccacctggagggtgtacagcaccggcagcaacgtgttccagaccagggccggctgcctgatcggcgccgagtacgtgaacaacagctacgagtgcgacatccccatcggcgccggcatctgcgccagctaccagacccagaccaagagccaccagcaggcccagagcgtggccagccagagcatcatcgcctacaccatgagcctgggcgccgagaacagcgtggcctacagcaacaacagcatcgccatccccaccaacttcaccatcagcgtgaccaccgagatcctgcccgtgagcatgaccaagaccagcgtggactgcaccatgtacatctgcggcgacagcaccgagtgcagcaacctgctgctgcagtacggcagcttctgcacccagctgaagagggccctgaccggcatcgccgtggagcaggacaagaacacccaggaggtgttcgcccaggtgaagcagatctacaagaccccccccatcaagtacttcggcggcttcaacttcagccagatcctgcccgaccccagcaagcccagcaagaggagccccatcgaggacctgctgttcaacaaggtgaccctggccgacgccggcttcatcaagcagtacggcgactgcctgggcgacatcgccgccagggacctgatctgcgcccagaagttcaacggcctgaccgtgctgccccccctgctgaccgacgagatgatcgcccagtacaccagcgccctgctggccggcaccatcaccagcggctggaccttcggcgccggccccgccctgcagatccccttccccatgcagatggcctacaggttcaacggcatcggcgtgacccagaacgtgctgtacgagaaccagaagctgatcgccaaccagttcaacagcgccatcggcaagatccaggacagcctgagcagcacccccagcgccctgggcaagctgcaggacgtggtgaaccacaacgcccaggccctgaacaccctggtgaagcagctgagcagcaagttcggcgccatcagcagcgtgctgaacgacatcctgagcaggctggacccccccgaggccgaggtgcagatcgacaggctgatcaccggcaggctgcagagcctgcagacctacgtgacccagcagctgatcagggccgccgagatcagggccagcgccaacctggccgccaccaagatgagcgagtgcgtgctgggccagagcaagagggtggacttctgcggcaagggctaccacctgatgagcttcccccagagcgccccccacggcgtggtgttcctgcacgtgacctacgtgcccgcccaggagaagaacttcaccaccgcccccgccatctgccacgacggcaaggcccacttccccagggagggcgtgttcgtgagcaacggcacccactggttcgtgacccagaggaacttctacgagccccagatcatcaccaccgacaacaccttcgtgagcggcaactgcgacgtggtgatcggcatcgtgaacaacaccgtgtacgaccccctgcagcccgagctggacagcttcaaggaggagctggacaagtacttcaagaaccacaccagccccgacgtggacctgggcgacatcagcggcatcaacgccagcgtggtgaacatccagaaggagatcgacaggctgaacgaggtggccaagaacctgaacgagagcctgatcgacctgcaggagctgggcaagtacgagcagtacatcaagtggccctggtacatctggctgggcttcatcgccggcctgatcgccatcgtgatggtgaccatcatgctgtgctgcatgaccagctgctgcagctgcctgaagggctgctgcagctgcggcagctgctgcaagttcgacgaggacgacagcgagcccgtgctgaagggcgtgaagctgcactacaccggaagcggagccacgaacttctctctgttaaagcaagcaggagatgttgaagaaaaccccgggcctatgaaggcaatactagtagttctgctatatacatttgcaaccgcaaatgcagacacattatgtataggttatcatgcgaacaactcaacagacactgtagacacagtactagaaaagaatgtaacagtaacacactctgttaaccttctagaagacaagcataacgggaaactatgcaaactaagaggggtagccccattgcatttgggtaaatgtaacattgctggctggatcctgggaaatccagagtgtgaatcactctccacagcaagctcatggtcctacattgtggaaacatctagttcagacaatggaacgtgttacccaggagatttcatcgattatgaggagctaagagagcaattgagctcagtgtcatcatttgaaaggtttgagatattccccaagacaagttcatggcccaatcatgactcgaacaaaggtgtaacgacagcatgtcctcatgctggagcaaaaagcttctacaaaaatttaatatggctagttaaaaaaggaaattcatacccaaagctcagcaaatcctacattaatgataaagggaaagaagtcctcgtgctatggggcattcaccatccacctactagtgctgaccaacaaagtctctatcagaatgcagatgcatatgtttttgtggggacatcaagatacagcaagaagttcaagccggaaatagcaataaggcccaaagtgagggatcaagaagggagaatgaactattactggacactagtagagccgggagacaaaataacattcgaagcaactggaaatctagtggtaccgagatatgcattcgcaatggaaagaaatgctggatctggtattatcatttcagatacaccagtccacgattgcaatacaacttgtcagacacccaagggtgctataaacaccagcctcccatttcagaacatacatccgatcacaattggaaaatgtccaaaatatgtaaaaagcacaaaattgagactggccacaggattgaggaatgtcccgtccattcaatctagaggcctatttggggccattgccggtttcattgaaggggggtggacagggatggtagatggatggtacggttatcaccatcaaaatgagcaggggtcaggatatgcagccgacctgaagagcacacagaatgccattgacgagattactaacaaagtaaactctgttattgaaaaaatgaatacacagttcacagcagtaggtaaagagttcaaccacctggaaaaaagaatagagaatttaaataaaaaagttgatgatggtttcctggacatttggacttacaatgccgaactgttggttctattggaaaatgaaagaactttggactaccacgattcaaaggtgaagaacttatatgaaaaggtaagaagccagttaaaaaacaatgccaaggaaattggaaacggctgctttgaattttaccacaaatgtgataacacgtgcatggaaagtgtcaaaaatgggacttatgactacccaaaatactcagaggaagcaaaattaaacagagaagaaatagatggggtaaagctggaatcaacaaggatttaccagattttggcgatctattcaaccgtcgccagttcattggtactggtagtctccctgggggcaatcagtttctggatgtgctctaatgggtctctacagtgtagaatatgtatttaaggaagcggagccacgaacttctctctgttaaagcaagcaggagatgttgaagaaaaccccgggcctagcaaaagcaggggataattctattaaccatgaagactatcattgctttgagctacattctatgtctggttttcgctcaaaaacttcctggaaatgacaatagcactgcaacgctgtgccttgggcaccatgcagtaccaaacggaacgatagtgaaaacaatcacgaatgaccaaattgaagttactaatgctactgagctggttcagaattcctcaataggtgaaatatgcgacagtcctcatcagatccttgatggagaaaactgcacactaatagatgctctattgggagaccctcagtgtgatggctttcaaaataagaaatgggacctttttgttgaacgaagcaaagcctacagcaactgttacccttatgatgtgccggattatgcctcccttaggtcactagttgcctcatccggcacactggagtttaacaatgaaagcttcaattgggctggagtcactcaaaacggaacaagttctgcttgcataaggggatctaatagtagtttctttagtagattaaattggttgacccacttaaacttcaagtacccagcattgaacgtgactatgccaaacaatgaacaatttgacaaattgtacatttggggggttcaccacccgggtacggacaaggaccaaatcttcctgtatgctcaatcatcaggaagaatcacagtatctaccaaaagaagccaacaagctgtaatcccgaatatcggatctagacccagaataaggaatatccctagcagaataagcatctattggacaatagtaaaaccgggagacatacttttgattaacagcacagggaatctaattgctcctaggggttacttcaaaatacgaagtgggaaaagctcaataatgagatcagatgcacccattggcaaatgcaagtctgaatgcatcactccaaatggaagcattcccaatgacaaaccattccaaaatgtaaacaggatcacatacggggcctgtcccagatatgttaagcaaagcactctgaaattggcaacaggaatgcgaaatgtaccagagaaacaaactagaggcatatttggcgcaatagcgggtttcatagaaaatggttgggagggaatggtggatggttggtacggtttcaggcatcaaaattctgagggaagaggacaagcagcagatctcaaaagcactcaagcagcaatcgatcaaatcaatgggaagctgaatcgattgatcgggaaaaccaacgagaaattccatcagattgagaaagaattctcagaagtagaagggagaattcaggaccttgagaaatatgttgaggacacaaaaatagatctctggtcatacaacgcagagcttcttgttgccctggaaaaccaacatacaattgatctaactgactcagaaatgaacaaactgtttgaaaaaacaaagaagcaactgagggaaaatgctgaggatatgggcaatggttgtttcaaaatataccacaaatgtgacaatgcctgcataggatcaatcagaaatggaacttatgaccacgatgtatacagggatgaagcattaaacaaccggttccagatcaagggagttgagctgaagtcagggtacaaagattggatcctatggatttcctttgccatatcatgttttttgctttgtgttgctttgttggggttcatcatgtgggcctgccaaaagggcaacattaggtgcaacatttgcatttgagtgcattaattaaaaacacccttgtttctactggaagcggagccacgaacttctctctgttaaagcaagcaggagatgttgaagaaaaccccgggcctattttctaatatccacaaaatgaaggcaataattgtactactcatggtagtaacatccaatgcagatcgaatctgcactgggataacatcgtcaaactcaccacatgtcgtcaaaactgctactcaaggggaggtcaacgtgaccggtgtaataccactgacaacaacacccaccaaatctcattttgcaaatctcaaaggaacagaaaccagggggaaactatgcccaaaatgcctcaactgcacagatctggatgtagccttgggcagaccaaaatgcacagggaaaataccctctgcaagggtttcaatactccatgaagtcagacctgttacatctgggtgctttcctataatgcacgatagaacaaaaattagacagctgcctaaccttctccgaggatacgaacatgtcaggttatcaactcacaacgttatcaatgcaaaagatgcaccaggaagaccctacgaaattggaacctcagggtcttgccctaacattaccaatggaaacggattcttcgcaacaatggcttgggccgtcccaaaaaacaaaacagcaacaaatccattaacaatagaagtaccatacatttgtacagaaggagaagaccaaattaccgtttgggggttccactctgacaacgagacccaaatggcaaagctctatggggactcaaagccccagaagttcacctcatctgccaacggagtgaccacacattacgtttcacagattggtggcttcccaaatcaaacagaagacggaggactaccacaaagtggcagaattgttgttgattacatggtgcagaaatctggaaaaacaggaacaattacctatcaaagaggtattttattgcctcaaaaagtgtggtgcgcaagtggcaggagcaaggtaataaaaggatccttgcccttaattggagaagcagattgcctccatgaaaaatacggtggattaaacaaaagcaagccttactacacaggggaacatgcaaaggccataggaaattgcccaatatgggtgaaaacacccttgaagctggccaatggaaccaaatatagaccccctgcaaaactattaaaggaaagaggtttcttcggagccattgctggtttcttagagggaggatgggaaggaatgattgcaggttggcacggatacacatcccatggggcacatggagtagcggtggcagctgaccttaagagcactcaagaggccataaacaagataacaaaaaatctcaactctttgagtgagctggaagtaaagaatcttcaaagactaagcggtgccatggatgaactccacaacgaaatactagaactagatgagaaagtggatgatctcagagctgacacaataagctcacaaatagaactcgcagtcctgctttccaatgaaggaataataaacagtgaagatgaacatctcttggcgcttgaaagaaagctgaagaaaatgctgggcccctctgctgtagagatagggaatggatgctttgaaaccaaacacaagtgcaaccagacctgcctcgacagaatagctgctggtacctttgatgcaggagaattttctctccccacctttgattcactgaatattactgctgcatctttaaatgacgacggattggacaatcatactatactgctttactactcaactgctgcctccagtttggctgtaacactgatgatagctatctttgttgtttatatggtctccagagacaatgtttcttgctccatttgtctataaggaaagttaagccctgtattttcctttattgtagtgcttgtttgcttgttgtcattacaaagaaacgttattgaaaaattgatgactcgagctggtactgcatgcacgcaatgctagctgcccctttcccgtcctgggtaccccgagtctcccccgacctcgggtcccaggtatgctcccacctccacctgccccactcaccacctctgctagttccagacacctcccaagcacgcagcaatgcagctcaaaacgcttagcctagccacacccccacgggaaacagcagtgattaacctttagcaataaacgaaagtttaactaagctatactaaccccagggttggtcaatttcgtgccagccacaccctggagctagcaaaaaaaa

SEQ ID NO: 404 - DNA, 10270 bp, synthetic construct
  source 1..10270: mol_type = other DNA; note = Hybrid Vaccine Candidate 16
tagttattaatagtaatcaattacggggtcattagttcatagcccatatatggagttccgcgttacataacttacggtaaatggcccgcctggctgaccgcccaacgacccccgcccattgacgtcaataatgacgtatgttcccatagtaacgccaatagggactttccattgacgtcaatgggtggagtatttacggtaaactgcccacttggcagtacatcaagtgtatcatatgccaagtacgccccctattgacgtcaatgacggtaaatggcccgcctggcattatgcccagtacatgaccttatgggactttcctacttggcagtacatctacgtattagtcatcgctattaccatggtgatgcggttttggcagtacatcaatgggcgtggatagcggtttgactcacggggatttccaagtctccaccccattgacgtcaatgggagtttgttttggcaccaaaatcaacgggactttccaaaatgtcgtaacaactccgccccattgacgcaaatgggcggtaggcgtgtacggtgggaggtctatataagcagagctggtttagtgaaccgtcagatcgagaataaactagtattcttctggtccccacagactcagagagaacccgccaccatgttcgtgttcctggtgctgctgcccctggtgagcagccagtgcgtgaacctgatcaccaggacccagagctacaccaacagcttcaccaggggcgtgtactaccccgacaaggtgttcaggagcagcgtgctgcacagcacccaggacctgttcctgcccttcttcagcaacgtgacctggttccacgccatccacgtgagcggcaccaacggcaccaagaggttcgacaaccccgtgctgcccttcaacgacggcgtgtacttcgccagcaccgagaagagcaacatcatcaggggctggatcttcggcaccaccctggacagcaagacccagagcctgctgatcgtgaacaacgccaccaacgtggtgatcaaggtgtgcgagttccagttctgcaacgaccccttcctggacgtgtactaccacaagaacaacaagagctggatggagagcgagttcagggtgtacagcagcgccaacaactgcaccttcgagtacgtgagccagcccttcctgatggacctggagggcaagcagggcaacttcaagaacctgagggagttcgtgttcaagaacatcgacggctacttcaagatctacagcaagcacacccccatcaacctgggcagggacctgccccagggcttcagcgccctggagcccctggtggacctgcccatcggcatcaacatcaccaggttccagaccctgctggccctgcacaggagctacctgacccccggcgacagcagcagcggctggaccgccggcgccgccgcctactacgtgggctacctgcagcccaggaccttcctgctgaagtacaacgagaacggcaccatcaccgacgccgtggactgcgccctggaccccctgagcgagaccaagtgcaccctgaagagcttcaccgtggagaagggcatctaccagaccagcaacttcagggtgcagcccaccgagagcatcgtgaggttccccaacatcaccaacctgtgccccttcgacgaggtgttcaacgccaccaggttcgccagcgtgtacgcctggaacaggaagaggatcagcaactgcgtggccgactacagcgtgctgtacaacttcgcccccttcttcgccttcaagtgctacggcgtgagccccaccaagctgaacgacctgtgcttcaccaacgtgtacgccgacagcttcgtgatcaggggcaacgaggtgagccagatcgcccccggccagaccggcaacatcgccgactacaactacaagctgcccgacgacttcaccggctgcgtgatcgcctggaacagcaacaagctggacagcaaggtgggcggcaactacaactacctgtacaggctgttcaggaagagcaacctgaagcccttcgagagggacatcagcaccgagatctaccaggccggcaacaagccctgcaacggcgtggccggcttcaactgctacttccccctgaggagctacggcttcaggcccacctacggcgtgggccaccagccctacagggtggtggtgctgagcttcgagctgctgcacgcccccgccaccgtgtgcggccccaagaagagcaccaacctggtgaagaacaagtgcgtgaacttcaacttcaacggcctgaccggcaccggcgtgctgaccgagagcaacaagaagttcctgcccttccagcagttcggcagggacatcgccgacaccaccgacgccgtgagggacccccagaccctggagatcctggacatcaccccctgcagcttcggcggcgtgagcgtgatcacccccggcaccaacaccagcaaccaggtggccgtgctgtaccagggcgtgaactgcaccgaggtgcccgtggccatccacgccgaccagctgacccccacctggagggtgtacagcaccggcagcaacgtgttccagaccagggccggctgcctgatcggcgccgagtacgtgaacaacagctacgagtgcgacatccccatcggcgccggcatctgcgccagctaccagacccagaccaagagccaccagcaggcccagagcgtggccagccagagcatcatcgcctacaccatgagcctgggcgccgagaacagcgtggcctacagcaacaacagcatcgccatccccaccaacttcaccatcagcgtgaccaccgagatcctgcccgtgagcatgaccaagaccagcgtggactgcaccatgtacatctgcggcgacagcaccgagtgcagcaacctgctgctgcagtacggcagcttctgcacccagctgaagagggccctgaccggcatcgccgtggagcaggacaagaacacccaggaggtgttcgcccaggtgaagcagatctacaagaccccccccatcaagtacttcggcggcttcaacttcagccagatcctgcccgaccccagcaagcccagcaagaggagcttcatcgaggacctgctgttcaacaaggtgaccctggccgacgccggcttcatcaagcagtacggcgactgcctgggcgacatcgccgccagggacctgatctgcgcccagaagttcaacggcctgaccgtgctgccccccctgctgaccgacgagatgatcgcccagtacaccagcgccctgctggccggcaccatcaccagcggctggaccttcggcgccggcgccgccctgcagatccccttcgccatgcagatggcctacaggttcaacggcatcggcgtgacccagaacgtgctgtacgagaaccagaagctgatcgccaaccagttcaacagcgccatcggcaagatccaggacagcctgagcagcaccgccagcgccctgggcaagctgcaggacgtggtgaaccacaacgcccaggccctgaacaccctggtgaagcagctgagcagcaagttcggcgccatcagcagcgtgctgaacgacatcctgagcaggctggacccccccgaggccgaggtgcagatcgacaggctgatcaccggcaggctgcagagcctgcagacctacgtgacccagcagctgatcagggccgccgagatcagggccagcgccaacctggccgccaccaagatgagcgagtgcgtgctgggccagagcaagagggtggacttctgcggcaagggctaccacctgatgagcttcccccagagcgccccccacggcgtggtgttcctgcacgtgacctacgtgcccgcccaggagaagaacttcaccaccgcccccgccatctgccacgacggcaaggcccacttccccagggagggcgtgttcgtgagcaacggcacccactggttcgtgacccagaggaacttctacgagccccagatcatcaccaccgacaacaccttcgtgagcggcaactgcgacgtggtgatcggcatcgtgaacaacaccgtgtacgaccccctgcagcccgagctggacagcttcaaggaggagctggacaagtacttcaagaaccacaccagccccgacgtggacctgggcgacatcagcggcatcaacgccagcgtggtgaacatccagaaggagatcgacaggctgaacgaggtggccaagaacctgaacgagagcctgatcgacctgcaggagctgggcaagtacgagcagtacatcaagtggccctggtacatctggctgggcttcatcgccggcctgatcgccatcgtgatggtgaccatcatgctgtgctgcatgaccagctgctgcagctgcctgaagggctgctgcagctgcggcagctgctgcaagttcgacgaggacgacagcgagcccgtgctgaagggcgtgaagctgcactacaccggaagcggagccacgaacttctctctgttaaagcaagcaggagatgttgaagaaaaccccgggcctatgaaggcaatactagtagttctgctatatacatttgcaaccgcaaatgcagacacattatgtataggttatcatgcgaacaactcaacagacactgtagacacagtactagaaaagaatgtaacagtaacacactctgttaaccttctagaagacaagcataacgggaaactatgcaaactaagaggggtagccccattgcatttgggtaaatgtaacattgctggctggatcctgggaaatccagagtgtgaatcactctccacagcaagctcatggtcctacattgtggaaacatctagttcagacaatggaacgtgttacccaggagatttcatcgattatgaggagctaagagagcaattgagctcagtgtcatcatttgaaaggtttgagatattccccaagacaagttcatggcccaatcatgactcgaacaaaggtgtaacgacagcatgtcctcatgctggagcaaaaagcttctacaaaaatttaatatggctagttaaaaaaggaaattcatacccaaagctcagcaaatcctacattaatgataaagggaaagaagtcctcgtgctatggggcattcaccatccacctactagtgctgaccaacaaagtctctatcagaatgcagatgcatatgtttttgtggggacatcaagatacagcaagaagttcaagccggaaatagcaataaggcccaaagtgagggatcaagaagggagaatgaactattactggacactagtagagccgggagacaaaataacattcgaagcaactggaaatctagtggtaccgagatatgcattcgcaatggaaagaaatgctggatctggtattatcatttcagatacaccagtccacgattgcaatacaacttgtcagacacccaagggtgctataaacaccagcctcccatttcagaacatacatccgatcacaattggaaaatgtccaaaatatgtaaaaagcacaaaattgagactggccacaggattgaggaatgtcccgtccattcaatctagaggcctatttggggccattgccggtttcattgaaggggggtggacagggatggtagatggatggtacggttatcaccatcaaaatgagcaggggtcaggatatgcagccgacctgaagagcacacagaatgccattgacgagattactaacaaagtaaactctgttattgaaaaaatgaatacacagttcacagcagtaggtaaagagttcaaccacctggaaaaaagaatagagaatttaaataaaaaagttgatgatggtttcctggacatttggacttacaatgccgaactgttggttctattggaaaatgaaagaactttggactaccacgattcaaaggtgaagaacttatatgaaaaggtaagaagccagttaaaaaacaatgccaaggaaattggaaacggctgctttgaattttaccacaaatgtgataacacgtgcatggaaagtgtcaaaaatgggacttatgactacccaaaatactcagaggaagcaaaattaaacagagaagaaatagatggggtaaagctggaatcaacaaggatttaccagattttggcgatctattcaaccgtcgccagttcattggtactggtagtctccctgggggcaatcagtttctggatgtgctctaatgggtctctacagtgtagaatatgtatttaaggaagcggagccacgaacttctctctgttaaagcaagcaggagatgttgaagaaaaccccgggcctagcaaaagcaggggataattctattaaccatgaagactatcattgctttgagctacattctatgtctggttttcgctcaaaaacttcctggaaatgacaatagcactgcaacgctgtgccttgggcaccatgcagtaccaaacggaacgatagtgaaaacaatcacgaatgaccaaattgaagttactaatgctactgagctggttcagaattcctcaataggtgaaatatgcgacagtcctcatcagatccttgatggagaaaactgcacactaatagatgctctattgggagaccctcagtgtgatggctttcaaaataagaaatgggacctttttgttgaacgaagcaaagcctacagcaactgttacccttatgatgtgccggattatgcctcccttaggtcactagttgcctcatccggcacactggagtttaacaatgaaagcttcaattgggctggagtcactcaaaacggaacaagttctgcttgcataaggggatctaatagtagtttctttagtagattaaattggttgacccacttaaacttcaagtacccagcattgaacgtgactatgccaaacaatgaacaatttgacaaattgtacatttggggggttcaccacccgggtacggacaaggaccaaatcttcctgtatgctcaatcatcaggaagaatcacagtatctaccaaaagaagccaacaagctgtaatcccgaatatcggatctagacccagaataaggaatatccctagcagaataagcatctattggacaatagtaaaaccgggagacatacttttgattaacagcacagggaatctaattgctcctaggggttacttcaaaatacgaagtgggaaaagctcaataatgagatcagatgcacccattggcaaatgcaagtctgaatgcatcactccaaatggaagcattcccaatgacaaaccattccaaaatgtaaacaggatcacatacggggcctgtcccagatatgttaagcaaagcactctgaaattggcaacaggaatgcgaaatgtaccagagaaacaaactagaggcatatttggcgcaatagcgggtttcatagaaaatggttgggagggaatggtggatggttggtacggtttcaggcatcaaaattctgagggaagaggacaagcagcagatctcaaaagcactcaagcagcaatcgatcaaatcaatgggaagctgaatcgattgatcgggaaaaccaacgagaaattccatcagattgagaaagaattctcagaagtagaagggagaattcaggaccttgagaaatatgttgaggacacaaaaatagatctctggtcatacaacgcagagcttcttgttgccctggaaaaccaacatacaattgatctaactgactcagaaatgaacaaactgtttgaaaaaacaaagaagcaactgagggaaaatgctgaggatatgggcaatggttgtttcaaaatataccacaaatgtgacaatgcctgcataggatcaatcagaaatggaacttatgaccacgatgtatacagggatgaagcattaaacaaccggttccagatcaagggagttgagctgaagtcagggtacaaagattggatcctatggatttcctttgccatatcatgttttttgctttgtgttgctttgttggggttcatcatgtgggcctgccaaaagggcaacattaggtgcaacatttgcatttgagtgcattaattaaaaacacccttgtttctactggaagcggagccacgaacttctctctgttaaagcaagcaggagatgttgaagaaaaccccgggcctattttctaatatccacaaaatgaaggcaataattgtactactcatggtagtaacatccaatgcagatcgaatctgcactgggataacatcgtcaaactcaccacatgtcgtcaaaactgctactcaaggggaggtcaacgtgaccggtgtaataccactgacaacaacacccaccaaatctcattttgcaaatctcaaaggaacagaaaccagggggaaactatgcccaaaatgcctcaactgcacagatctggatgtagccttgggcagaccaaaatgcacagggaaaataccctctgcaagggtttcaatactccatgaagtcagacctgttacatctgggtgctttcctataatgcacgatagaacaaaaattagacagctgcctaaccttctccgaggatacgaacatgtcaggttatcaactcacaacgttatcaatgcaaaagatgcaccaggaagaccctacgaaattggaacctcagggtcttgccctaacattaccaatggaaacggattcttcgcaacaatggcttgggccgtcccaaaaaacaaaacagcaacaaatccattaacaatagaagtaccatacatttgtacagaaggagaagaccaaattaccgtttgggggttccactctgacaacgagacccaaatggcaaagctctatggggactcaaagccccagaagttcacctcatctgccaacggagtgaccacacattacgtttcacagattggtggcttcccaaatcaaacagaagacggaggactaccacaaagtggcagaattgttgttgattacatggtgcagaaatctggaaaaacaggaacaattacctatcaaagaggtattttattgcctcaaaaagtgtggtgcgcaagtggcaggagcaaggtaataaaaggatccttgcccttaattggagaagcagattgcctccatgaaaaatacggtggattaaacaaaagcaagccttactacacaggggaacatgcaaaggccataggaaattgcccaatatgggtgaaaacacccttgaagctggccaatggaaccaaatatagaccccctgcaaaactattaaaggaaagaggtttcttcggagccattgctggtttcttagagggaggatgggaaggaatgattgcaggttggcacggatacacatcccatggggcacatggagtagcggtggcagctgaccttaagagcactcaagaggccataaacaagataacaaaaaatctcaactctttgagtgagctggaagtaaagaatcttcaaagactaagcggtgccatggatgaactccacaacgaaatactagaactagatgagaaagtggatgatctcagagctgacacaataagctcacaaatagaactcgcagtcctgctttccaatgaaggaataataaacagtgaagatgaacatctcttggcgcttgaaagaaagctgaagaaaatgctgggcccctctgctgtagagatagggaatggatgctttgaaaccaaacacaagtgcaaccagacctgcctcgacagaatagctgctggtacctttgatgcaggagaattttctctccccacctttgattcactgaatattactgctgcatctttaaatgacgacggattggacaatcatactatactgctttactactcaactgctgcctccagtttggctgtaacactgatgatagctatctttgttgtttatatggtctccagagacaatgtttcttgctccatttgtctataaggaaagttaagccctgtattttcctttattgtagtgcttgtttgcttgttgtcattacaaagaaacgttattgaaaaattgatgactcgagctggtactgcatgcacgcaatgctagctgcccctttcccgtcctgggtaccccgagtctcccccgacctcgggtcccaggtatgctcccacctccacctgccccactcaccacctctgctagttccagacacctcccaagcacgcagcaatgcagctcaaaacgcttagcctagccacacccccacgggaaacagcagtgattaacctttagcaataaacgaaagtttaactaagctatactaaccccagggttggtcaatttcgtgccagccacaccctggagctagcaaaaaaaa

SEQ ID NO: 405 - DNA, 11414 bp, synthetic construct
  source 1..11414: mol_type = other DNA; note = Hybrid Vaccine Candidate 17
ctcgacattgattattgactagttattaatagtaatcaattacggggtcattagttcatagcccatatatggagttccgcgttacataacttacggtaaatggcccgcctggctgaccgcccaacgacccccgcccattgacgtcaataatgacgtatgttcccatagtaacgccaatagggactttccattgacgtcaatgggtggagtatttacggtaaactgcccacttggcagtacatcaagtgtatcatatgccaagtacgccccctattgacgtcaatgacggtaaatggcccgcctggcattatgcccagtacatgaccttatgggactttcctacttggcagtacatctacgtattagtcatcgctattaccatggtcgaggtgagccccacgttctgcttcactctccccatctcccccccctccccacccccaattttgtatttatttattttttaattattttgtgcagcgatgggggcggggggggggggggggcgcgcgccaggcggggcggggcggggcgaggggcggggcggggcgaggcggagaggtgcggcggcagccaatcagagcggcgcgctccgaaagtttccttttatggcgaggcggcggcggcggcggccctataaaaagcgaagcgcgcggcgggcgggagtcgctgcgcgctgccttcgccccgtgccccgctccgccgccgcctcgcgccgcccgccccggctctgactgaccgcgttactcccacaggtgagcgggcgggacggcccttctcctccgggctgtaattagcgcttggtttaatgacggcttgtttcttttctgtggctgcgtgaaagccttgaggggctccgggagggccctttgtgcggggggagcggctcggggggtgcgtgcgtgtgtgtgtgcgtggggagcgccgcgtgcggctccgcgctgcccggcggctgtgagcgctgcgggcgcggcgcggggctttgtgcgctccgcagtgtgcgcgaggggagcgcggccgggggcggtgccccgcggtgcggggggggctgcgaggggaacaaaggctgcgtgcggggtgtgtgcgtgggggggtgagcagggggtgtgggcgcgtcggtcgggctgcaaccccccctgcacccccctccccgagttgctgagcacggcccggcttcgggtgcggggctccgtacggggcgtggcgcggggctcgccgtgccgggcggggggtggcggcaggtgggggtgccgggcggggcggggccgcctcgggccggggagggctcgggggaggggcgcggcggcccccggagcgccggcggctgtcgaggcgcggcgagccgcagccattgccttttatggtaatcgtgcgagagggcgcagggacttcctttgtcccaaatctgtgcggagccgaaatctgggaggcgccgccgcaccccctctagcgggcgcggggcgaagcggtgcggcgccggcaggaaggaaatgggcggggagggccttcgtgcgtcgccgcgccgccgtccccttctccctctccagcctcggggctgtccgcggggggacggctgccttcgggggggacggggcagggcggggttcggcttctggcgtgtgaccggcggctctagagcctctgctaaccatgttcatgccttcttctttttcctacagctcctgggcaacgtgctggttattgtgctgtctcatcattttggcaaagaattggagaataaactagtattcttctggtccccacagactcagagagaacccgccaccatgttcgtgttcctggtgctgctgcccctggtgagcagccagtgcgtgaacctgatcaccaggacccagagctacaccaacagcttcaccaggggcgtgtactaccccgacaaggtgttcaggagcagcgtgctgcacagcacccaggacctgttcctgcccttcttcagcaacgtgacctggttccacgccatccacgtgagcggcaccaacggcaccaagaggttcgacaaccccgtgctgcccttcaacgacggcgtgtacttcgccagcaccgagaagagcaacatcatcaggggctggatcttcggcaccaccctggacagcaagacccagagcctgctgatcgtgaacaacgccaccaacgtggtgatcaaggtgtgcgagttccagttctgcaacgaccccttcctggacgtgtactaccacaagaacaacaagagctggatggagagcgagttcagggtgtacagcagcgccaacaactgcaccttcgagtacgtgagccagcccttcctgatggacctggagggcaagcagggcaacttcaagaacctgagggagttcgtgttcaagaacatcgacggctacttcaagatctacagcaagcacacccccatcaacctgggcagggacctgccccagggcttcagcgccctggagcccctggtggacctgcccatcggcatcaacatcaccaggttccagaccctgctggccctgcacaggagctacctgacccccggcgacagcagcagcggctggaccgccggcgccgccgcctactacgtgggctacctgcagcccaggaccttcctgctgaagtacaacgagaacggcaccatcaccgacgccgtggactgcgccctggaccccctgagcgagaccaagtgcaccctgaagagcttcaccgtggagaagggcatctaccagaccagcaacttcagggtgcagcccaccgagagcatcgtgaggttccccaacatcaccaacctgtgccccttcgacgaggtgttcaacgccaccaggttcgccagcgtgtacgcctggaacaggaagaggatcagcaactgcgtggccgactacagcgtgctgtacaacttcgcccccttcttcgccttcaagtgctacggcgtgagccccaccaagctgaacgacctgtgcttcaccaacgtgtacgccgacagcttcgtgatcaggggcaacgaggtgagccagatcgcccccggccagaccggcaacatcgccgactacaactacaagctgcccgacgacttcaccggctgcgtgatcgcctggaacagcaacaagctggacagcaaggtgggcggcaactacaactacctgtacaggctgttcaggaagagcaacctgaagcccttcgagagggacatcagcaccgagatctaccaggccggcaacaagccctgcaacggcgtggccggcttcaactgctacttccccctgaggagctacggcttcaggcccacctacggcgtgggccaccagccctacagggtggtggtgctgagcttcgagctgctgcacgcccccgccaccgtgtgcggccccaagaagagcaccaacctggtgaagaacaagtgcgtgaacttcaacttcaacggcctgaccggcaccggcgtgctgaccgagagcaacaagaagttcctgcccttccagcagttcggcagggacatcgccgacaccaccgacgccgtgagggacccccagaccctggagatcctggacatcaccccctgcagcttcggcggcgtgagcgtgatcacccccggcaccaacaccagcaaccaggtggccgtgctgtaccagggcgtgaactgcaccgaggtgcccgtggccatccacgccgaccagctgacccccacctggagggtgtacagcaccggcagcaacgtgttccagaccagggccggctgcctgatcggcgccgagtacgtgaacaacagctacgagtgcgacatccccatcggcgccggcatctgcgccagctaccagacccagaccaagagccaccagcaggcccagagcgtggccagccagagcatcatcgcctacaccatgagcctgggcgccgagaacagcgtggcctacagcaacaacagcatcgccatccccaccaacttcaccatcagcgtgaccaccgagatcctgcccgtgagcatgaccaagaccagcgtggactgcaccatgtacatctgcggcgacagcaccgagtgcagcaacctgctgctgcagtacggcagcttctgcacccagctgaagagggccctgaccggcatcgccgtggagcaggacaagaacacccaggaggtgttcgcccaggtgaagcagatctacaagaccccccccatcaagtacttcggcggcttcaacttcagccagatcctgcccgaccccagcaagcccagcaagaggagccccatcgaggacctgctgttcaacaaggtgaccctggccgacgccggcttcatcaagcagtacggcgactgcctgggcgacatcgccgccagggacctgatctgcgcccagaagttcaacggcctgaccgtgctgccccccctgctgaccgacgagatgatcgcccagtacaccagcgccctgctggccggcaccatcaccagcggctggaccttcggcgccggccccgccctgcagatccccttccccatgcagatggcctacaggttcaacggcatcggcgtgacccagaacgtgctgtacgagaaccagaagctgatcgccaaccagttcaacagcgccatcggcaagatccaggacagcctgagcagcacccccagcgccctgggcaagctgcaggacgtggtgaaccacaacgcccaggccctgaacaccctggtgaagcagctgagcagcaagttcggcgccatcagcagcgtgctgaacgacatcctgagcaggctggacccccccgaggccgaggtgcagatcgacaggctgatcaccggcaggctgcagagcctgcagacctacgtgacccagcagctgatcagggccgccgagatcagggccagcgccaacctggccgccaccaagatgagcgagtgcgtgctgggccagagcaagagggtggacttctgcggcaagggctaccacctgatgagcttcccccagagcgccccccacggcgtggtgttcctgcacgtgacctacgtgcccgcccaggagaagaacttcaccaccgcccccgccatctgccacgacggcaaggcccacttccccagggagggcgtgttcgtgagcaacggcacccactggttcgtgacccagaggaacttctacgagccccagatcatcaccaccgacaacaccttcgtgagcggcaactgcgacgtggtgatcggcatcgtgaacaacaccgtgtacgaccccctgcagcccgagctggacagcttcaaggaggagctggacaagtacttcaagaaccacaccagccccgacgtggacctgggcgacatcagcggcatcaacgccagcgtggtgaacatccagaaggagatcgacaggctgaacgaggtggccaagaacctgaacgagagcctgatcgacctgcaggagctgggcaagtacgagcagtacatcaagtggccctggtacatctggctgggcttcatcgccggcctgatcgccatcgtgatggtgaccatcatgctgtgctgcatgaccagctgctgcagctgcctgaagggctgctgcagctgcggcagctgctgcaagttcgacgaggacgacagcgagcccgtgctgaagggcgtgaagctgcactacaccggaagcggagccacgaacttctctctgttaaagcaagcaggagatgttgaagaaaaccccgggcctatgaaggcaatactagtagttctgctatatacatttgcaaccgcaaatgcagacacattatgtataggttatcatgcgaacaactcaacagacactgtagacacagtactagaaaagaatgtaacagtaacacactctgttaaccttctagaagacaagcataacgggaaactatgcaaactaagaggggtagccccattgcatttgggtaaatgtaacattgctggctggatcctgggaaatccagagtgtgaatcactctccacagcaagctcatggtcctacattgtggaaacatctagttcagacaatggaacgtgttacccaggagatttcatcgattatgaggagctaagagagcaattgagctcagtgtcatcatttgaaaggtttgagatattccccaagacaagttcatggcccaatcatgactcgaacaaaggtgtaacgacagcatgtcctcatgctggagcaaaaagcttctacaaaaatttaatatggctagttaaaaaaggaaattcatacccaaagctcagcaaatcctacattaatgataaagggaaagaagtcctcgtgctatggggcattcaccatccacctactagtgctgaccaacaaagtctctatcagaatgcagatgcatatgtttttgtggggacatcaagatacagcaagaagttcaagccggaaatagcaataaggcccaaagtgagggatcaagaagggagaatgaactattactggacactagtagagccgggagacaaaataacattcgaagcaactggaaatctagtggtaccgagatatgcattcgcaatggaaagaaatgctggatctggtattatcatttcagatacaccagtccacgattgcaatacaacttgtcagacacccaagggtgctataaacaccagcctcccatttcagaacatacatccgatcacaattggaaaatgtccaaaatatgtaaaaagcacaaaattgagactggccacaggattgaggaatgtcccgtccattcaatctagaggcctatttggggccattgccggtttcattgaaggggggtggacagggatggtagatggatggtacggttatcaccatcaaaatgagcaggggtcaggatatgcagccgacctgaagagcacacagaatgccattgacgagattactaacaaagtaaactctgttattgaaaaaatgaatacacagttcacagcagtaggtaaagagttcaaccacctggaaaaaagaatagagaatttaaataaaaaagttgatgatggtttcctggacatttggacttacaatgccgaactgttggttctattggaaaatgaaagaactttggactaccacgattcaaaggtgaagaacttatatgaaaaggtaagaagccagttaaaaaacaatgccaaggaaattggaaacggctgctttgaattttaccacaaatgtgataacacgtgcatggaaagtgtcaaaaatgggacttatgactacccaaaatactcagaggaagcaaaattaaacagagaagaaatagatggggtaaagctggaatcaacaaggatttaccagattttggcgatctattcaaccgtcgccagttcattggtactggtagtctccctgggggcaatcagtttctggatgtgctctaatgggtctctacagtgtagaatatgtatttaaggaagcggagccacgaacttctctctgttaaagcaagcaggagatgttgaagaaaaccccgggcctagcaaaagcaggggataattctattaaccatgaagactatcattgctttgagctacattctatgtctggttttcgctcaaaaacttcctggaaatgacaatagcactgcaacgctgtgccttgggcaccatgcagtaccaaacggaacgatagtgaaaacaatcacgaatgaccaaattgaagttactaatgctactgagctggttcagaattcctcaataggtgaaatatgcgacagtcctcatcagatccttgatggagaaaactgcacactaatagatgctctattgggagaccctcagtgtgatggctttcaaaataagaaatgggacctttttgttgaacgaagcaaagcctacagcaactgttacccttatgatgtgccggattatgcctcccttaggtcactagttgcctcatccggcacactggagtttaacaatgaaagcttcaattgggctggagtcactcaaaacggaacaagttctgcttgcataaggggatctaatagtagtttctttagtagattaaattggttgacccacttaaacttcaagtacccagcattgaacgtgactatgccaaacaatgaacaatttgacaaattgtacatttggggggttcaccacccgggtacggacaaggaccaaatcttcctgtatgctcaatcatcaggaagaatcacagtatctaccaaaagaagccaacaagctgtaatcccgaatatcggatctagacccagaataaggaatatccctagcagaataagcatctattggacaatagtaaaaccgggagacatacttttgattaacagcacagggaatctaattgctcctaggggttacttcaaaatacgaagtgggaaaagctcaataatgagatcagatgcacccattggcaaatgcaagtctgaatgcatcactccaaatggaagcattcccaatgacaaaccattccaaaatgtaaacaggatcacatacggggcctgtcccagatatgttaagcaaagcactctgaaattggcaacaggaatgcgaaatgtaccagagaaacaaactagaggcatatttggcgcaatagcgggtttcatagaaaatggttgggagggaatggtggatggttggtacggtttcaggcatcaaaattctgagggaagaggacaagcagcagatctcaaaagcactcaagcagcaatcgatcaaatcaatgggaagctgaatcgattgatcgggaaaaccaacgagaaattccatcagattgagaaagaattctcagaagtagaagggagaattcaggaccttgagaaatatgttgaggacacaaaaatagatctctggtcatacaacgcagagcttcttgttgccctggaaaaccaacatacaattgatctaactgactcagaaatgaacaaactgtttgaaaaaacaaagaagcaactgagggaaaatgctgaggatatgggcaatggttgtttcaaaatataccacaaatgtgacaatgcctgcataggatcaatcagaaatggaacttatgaccacgatgtatacagggatgaagcattaaacaaccggttccagatcaagggagttgagctgaagtcagggtacaaagattggatcctatggatttcctttgccatatcatgttttttgctttgtgttgctttgttggggttcatcatgtgggcctgccaaaagggcaacattaggtgcaacatttgcatttgagtgcattaattaaaaacacccttgtttctactggaagcggagccacgaacttctctctgttaaagcaagcaggagatgttgaagaaaaccccgggcctattttctaatatccacaaaatgaaggcaataattgtactactcatggtagtaacatccaatgcagatcgaatctgcactgggataacatcgtcaaactcaccacatgtcgtcaaaactgctactcaaggggaggtcaacgtgaccggtgtaataccactgacaacaacacccaccaaatctcattttgcaaatctcaaaggaacagaaaccagggggaaactatgcccaaaatgcctcaactgcacagatctggatgtagccttgggcagaccaaaatgcacagggaaaataccctctgcaagggtttcaatactccatgaagtcagacctgttacatctgggtgctttcctataatgcacgatagaacaaaaattagacagctgcctaaccttctccgaggatacgaacatgtcaggttatcaactcacaacgttatcaatgcaaaagatgcaccaggaagaccctacgaaattggaacctcagggtcttgccctaacattaccaatggaaacggattcttcgcaacaatggcttgggccgtcccaaaaaacaaaacagcaacaaatccattaacaatagaagtaccatacatttgtacagaaggagaagaccaaattaccgtttgggggttccactctgacaacgagacccaaatggcaaagctctatggggactcaaagccccagaagttcacctcatctgccaacggagtgaccacacattacgtttcacagattggtggcttcccaaatcaaacagaagacggaggactaccacaaagtggcagaattgttgttgattacatggtgcagaaatctggaaaaacaggaacaattacctatcaaagaggtattttattgcctcaaaaagtgtggtgcgcaagtggcaggagcaaggtaataaaaggatccttgcccttaattggagaagcagattgcctccatgaaaaatacggtggattaaacaaaagcaagccttactacacaggggaacatgcaaaggccataggaaattgcccaatatgggtgaaaacacccttgaagctggccaatggaaccaaatatagaccccctgcaaaactattaaaggaaagaggtttcttcggagccattgctggtttcttagagggaggatgggaaggaatgattgcaggttggcacggatacacatcccatggggcacatggagtagcggtggcagctgaccttaagagcactcaagaggccataaacaagataacaaaaaatctcaactctttgagtgagctggaagtaaagaatcttcaaagactaagcggtgccatggatgaactccacaacgaaatactagaactagatgagaaagtggatgatctcagagctgacacaataagctcacaaatagaactcgcagtcctgctttccaatgaaggaataataaacagtgaagatgaacatctcttggcgcttgaaagaaagctgaagaaaatgctgggcccctctgctgtagagatagggaatggatgctttgaaaccaaacacaagtgcaaccagacctgcctcgacagaatagctgctggtacctttgatgcaggagaattttctctccccacctttgattcactgaatattactgctgcatctttaaatgacgacggattggacaatcatactatactgctttactactcaactgctgcctccagtttggctgtaacactgatgatagctatctttgttgtttatatggtctccagagacaatgtttcttgctccatttgtctataaggaaagttaagccctgtattttcctttattgtagtgcttgtttgcttgttgtcattacaaagaaacgttattgaaaaattgatgactcgagctggtactgcatgcacgcaatgctagctgcccctttcccgtcctgggtaccccgagtctcccccgacctcgggtcccaggtatgctcccacctccacctgccccactcaccacctctgctagttccagacacctcccaagcacgcagcaatgcagctcaaaacgcttagcctagccacacccccacgggaaacagcagtgattaacctttagcaataaacgaaagtttaactaagctatactaaccccagggttggtcaatttcgtgccagccacaccctggagctagcaaaaaaaa

SEQ ID NO: 406 - DNA, 11414 bp, synthetic construct
  source 1..11414: mol_type = other DNA; note = Hybrid Vaccine Candidate 18
ctcgacattgattattgactagttattaatagtaatcaattacggggtcattagttcatagcccatatatggagttccgcgttacataacttacggtaaatggcccgcctggctgaccgcccaacgacccccgcccattgacgtcaataatgacgtatgttcccatagtaacgccaatagggactttccattgacgtcaatgggtggagtatttacggtaaactgcccacttggcagtacatcaagtgtatcatatgccaagtacgccccctattgacgtcaatgacggtaaatggcccgcctggcattatgcccagtacatgaccttatgggactttcctacttggcagtacatctacgtattagtcatcgctattaccatggtcgaggtgagccccacgttctgcttcactctccccatctcccccccctccccacccccaattttgtatttatttattttttaattattttgtgcagcgatgggggcggggggggggggggggcgcgcgccaggcggggcggggcggggcgaggggcggggcggggcgaggcggagaggtgcggcggcagccaatcagagcggcgcgctccgaaagtttccttttatggcgaggcggcggcggcggcggccctataaaaagcgaagcgcgcggcgggcgggagtcgctgcgcgctgccttcgccccgtgccccgctccgccgccgcctcgcgccgcccgccccggctctgactgaccgcgttactcccacaggtgagcgggcgggacggcccttctcctccgggctgtaattagcgcttggtttaatgacggcttgtttcttttctgtggctgcgtgaaagccttgaggggctccgggagggccctttgtgcggggggagcggctcggggggtgcgtgcgtgtgtgtgtgcgtggggagcgccgcgtgcggctccgcgctgcccggcggctgtgagcgctgcgggcgcggcgcggggctttgtgcgctccgcagtgtgcgcgaggggagcgcggccgggggcggtgccccgcggtgcggggggggctgcgaggggaacaaaggctgcgtgcggggtgtgtgcgtgggggggtgagcagggggtgtgggcgcgtcggtcgggctgcaaccccccctgcacccccctccccgagttgctgagcacggcccggcttcgggtgcggggctccgtacggggcgtggcgcggggctcgccgtgccgggcggggggtggcggcaggtgggggtgccgggcggggcggggccgcctcgggccggggagggctcgggggaggggcgcggcggcccccggagcgccggcggctgtcgaggcgcggcgagccgcagccattgccttttatggtaatcgtgcgagagggcgcagggacttcctttgtcccaaatctgtgcggagccgaaatctgggaggcgccgccgcaccccctctagcgggcgcggggcgaagcggtgcggcgccggcaggaaggaaatgggcggggagggccttcgtgcgtcgccgcgccgccgtccccttctccctctccagcctcggggctgtccgcggggggacggctgccttcgggggggacggggcagggcggggttcggcttctggcgtgtgaccggcggctctagagcctctgctaaccatgttcatgccttcttctttttcctacagctcctgggcaacgtgctggttattgtgctgtctcatcattttggcaaagaattggagaataaactagtattcttctggtccccacagactcagagagaacccgccaccatgttcgtgttcctggtgctgctgcccctggtgagcagccagtgcgtgaacctgatcaccaggacccagagctacaccaacagcttcaccaggggcgtgtactaccccgacaaggtgttcaggagcagcgtgctgcacagcacccaggacctgttcctgcccttcttcagcaacgtgacctggttccacgccatccacgtgagcggcaccaacggcaccaagaggttcgacaaccccgtgctgcccttcaacgacggcgtgtacttcgccagcaccgagaagagcaacatcatcaggggctggatcttcggcaccaccctggacagcaagacccagagcctgctgatcgtgaacaacgccaccaacgtggtgatcaaggtgtgcgagttccagttctgcaacgaccccttcctggacgtgtactaccacaagaacaacaagagctggatggagagcgagttcagggtgtacagcagcgccaacaactgcaccttcgagtacgtgagccagcccttcctgatggacctggagggcaagcagggcaacttcaagaacctgagggagttcgtgttcaagaacatcgacggctacttcaagatctacagcaagcacacccccatcaacctgggcagggacctgccccagggcttcagcgccctggagcccctggtggacctgcccatcggcatcaacatcaccaggttccagaccctgctggccctgcacaggagctacctgacccccggcgacagcagcagcggctggaccgccggcgccgccgcctactacgtgggctacctgcagcccaggaccttcctgctgaagtacaacgagaacggcaccatcaccgacgccgtggactgcgccctggaccccctgagcgagaccaagtgcaccctgaagagcttcaccgtggagaagggcatctaccagaccagcaacttcagggtgcagcccaccgagagcatcgtgaggttccccaacatcaccaacctgtgccccttcgacgaggtgttcaacgccaccaggttcgccagcgtgtacgcctggaacaggaagaggatcagcaactgcgtggccgactacagcgtgctgtacaacttcgcccccttcttcgccttcaagtgctacggcgtgagccccaccaagctgaacgacctgtgcttcaccaacgtgtacgccgacagcttcgtgatcaggggcaacgaggtgagccagatcgcccccggccagaccggcaacatcgccgactacaactacaagctgcccgacgacttcaccggctgcgtgatcgcctggaacagcaacaagctggacagcaaggtgggcggcaactacaactacctgtacaggctgttcaggaagagcaacctgaagcccttcgagagggacatcagcaccgagatctaccaggccggcaacaagccctgcaacggcgtggccggcttcaactgctacttccccctgaggagctacggcttcaggcccacctacggcgtgggccaccagccctacagggtggtggtgctgagcttcgagctgctgcacgcccccgccaccgtgtgcggccccaagaagagcaccaacctggtgaagaacaagtgcgtgaacttcaacttcaacggcctgaccggcaccggcgtgctgaccgagagcaacaagaagttcctgcccttccagcagttcggcagggacatcgccgacaccaccgacgccgtgagggacccccagaccctggagatcctggacatcaccccctgcagcttcggcggcgtgagcgtgatcacccccggcaccaacaccagcaaccaggtggccgtgctgtaccagggcgtgaactgcaccgaggtgcccgtggccatccacgccgaccagctgacccccacctggagggtgtacagcaccggcagcaacgtgttccagaccagggccggctgcctgatcggcgccgagtacgtgaacaacagctacgagtgcgacatccccatcggcgccggcatctgcgccagctaccagacccagaccaagagccaccagcaggcccagagcgtggccagccagagcatcatcgcctacaccatgagcctgggcgccgagaacagcgtggcctacagcaacaacagcatcgccatccccaccaacttcaccatcagcgtgaccaccgagatcctgcccgtgagcatgaccaagaccagcgtggactgcaccatgtacatctgcggcgacagcaccgagtgcagcaacctgctgctgcagtacggcagcttctgcacccagctgaagagggccctgaccggcatcgccgtggagcaggacaagaacacccaggaggtgttcgcccaggtgaagcagatctacaagaccccccccatcaagtacttcggcggcttcaacttcagccagatcctgcccgaccccagcaagcccagcaagaggagcttcatcgaggacctgctgttcaacaaggtgaccctggccgacgccggcttcatcaagcagtacggcgactgcctgggcgacatcgccgccagggacctgatctgcgcccagaagttcaacggcctgaccgtgctgccccccctgctgaccgacgagatgatcgcccagtacaccagcgccctgctggccggcaccatcaccagcggctggaccttcggcgccggcgccgccctgcagatccccttcgccatgcagatggcctacaggttcaacggcatcggcgtgacccagaacgtgctgtacgagaaccagaagctgatcgccaaccagttcaacagcgccatcggcaagatccaggacagcctgagcagcaccgccagcgccctgggcaagctgcaggacgtggtgaaccacaacgcccaggccctgaacaccctggtgaagcagctgagcagcaagttcggcgccatcagcagcgtgctgaacgacatcctgagcaggctggacccccccgaggccgaggtgcagatcgacaggctgatcaccggcaggctgcagagcctgcagacctacgtgacccagcagctgatcagggccgccgagatcagggccagcgccaacctggccgccaccaagatgagcgagtgcgtgctgggccagagcaagagggtggacttctgcggcaagggctaccacctgatgagcttcccccagagcgccccccacggcgtggtgttcctgcacgtgacctacgtgcccgcccaggagaagaacttcaccaccgcccccgccatctgccacgacggcaaggcccacttccccagggagggcgtgttcgtgagcaacggcacccactggttcgtgacccagaggaacttctacgagccccagatcatcaccaccgacaacaccttcgtgagcggcaactgcgacgtggtgatcggcatcgtgaacaacaccgtgtacgaccccctgcagcccgagctggacagcttcaaggaggagctggacaagtacttcaagaaccacaccagccccgacgtggacctgggcgacatcagcggcatcaacgccagcgtggtgaacatccagaaggagatcgacaggctgaacgaggtggccaagaacctgaacgagagcctgatcgacctgcaggagctgggcaagtacgagcagtacatcaagtggccctggtacatctggctgggcttcatcgccggcctgatcgccatcgtgatggtgaccatcatgctgtgctgcatgaccagctgctgcagctgcctgaagggctgctgcagctgcggcagctgctgcaagttcgacgaggacgacagcgagcccgtgctgaagggcgtgaagctgcactacaccggaagcggagccacgaacttctctctgttaaagcaagcaggagatgttgaagaaaaccccgggcctatgaaggcaatactagtagttctgctatatacatttgcaaccgcaaatgcagacacattatgtataggttatcatgcgaacaactcaacagacactgtagacacagtactagaaaagaatgtaacagtaacacactctgttaaccttctagaagacaagcataacgggaaactatgcaaactaagaggggtagccccattgcatttgggtaaatgtaacattgctggctggatcctgggaaatccagagtgtgaatcactctccacagcaagctcatggtcctacattgtggaaacatctagttcagacaatggaacgtgttacccaggagatttcatcgattatgaggagctaagagagcaattgagctcagtgtcatcatttgaaaggtttgagatattccccaagacaagttcatggcccaatcatgactcgaacaaaggtgtaacgacagcatgtcctcatgctggagcaaaaagcttctacaaaaatttaatatggctagttaaaaaaggaaattcatacccaaagctcagcaaatcctacattaatgataaagggaaagaagtcctcgtgctatggggcattcaccatccacctactagtgctgaccaacaaagtctctatcagaatgcagatgcatatgtttttgtggggacatcaagatacagcaagaagttcaagccggaaatagcaataaggcccaaagtgagggatcaagaagggagaatgaactattactggacactagtagagccgggagacaaaataacattcgaagcaactggaaatctagtggtaccgagatatgcattcgcaatggaaagaaatgctggatctggtattatcatttcagatacaccagtccacgattgcaatacaacttgtcagacacccaagggtgctataaacaccagcctcccatttcagaacatacatccgatcacaattggaaaatgtccaaaatatgtaaaaagcacaaaattgagactggccacaggattgaggaatgtcccgtccattcaatctagaggcctatttggggccattgccggtttcattgaaggggggtggacagggatggtagatggatggtacggttatcaccatcaaaatgagcaggggtcaggatatgcagccgacctgaagagcacacagaatgccattgacgagattactaacaaagtaaactctgttattgaaaaaatgaatacacagttcacagcagtaggtaaagagttcaaccacctggaaaaaagaatagagaatttaaataaaaaagttgatgatggtttcctggacatttggacttacaatgccgaactgttggttctattggaaaatgaaagaactttggactaccacgattcaaaggtgaagaacttatatgaaaaggtaagaagccagttaaaaaacaatgccaaggaaattggaaacggctgctttgaattttaccacaaatgtgataacacgtgcatggaaagtgtcaaaaatgggacttatgactacccaaaatactcagaggaagcaaaattaaacagagaagaaatagatggggtaaagctggaatcaacaaggatttaccagattttggcgatctattcaaccgtcgccagttcattggtactggtagtctccctgggggcaatcagtttctggatgtgctctaatgggtctctacagtgtagaatatgtatttaaggaagcggagccacgaacttctctctgttaaagcaagcaggagatgttgaagaaaaccccgggcctagcaaaagcaggggataattctattaaccatgaagactatcattgctttgagctacattctatgtctggttttcgctcaaaaacttcctggaaatgacaatagcactgcaacgctgtgccttgggcaccatgcagtaccaaacggaacgatagtgaaaacaatcacgaatgaccaaattgaagttactaatgctactgagctggttcagaattcctcaataggtgaaatatgcgacagtcctcatcagatccttgatggagaaaactgcacactaatagatgctctattgggagaccctcagtgtgatggctttcaaaataagaaatgggacctttttgttgaacgaagcaaagcctacagcaactgttacccttatgatgtgccggattatgcctcccttaggtcactagttgcctcatccggcacactggagtttaacaatgaaagcttcaattgggctggagtcactcaaaacggaacaagttctgcttgcataaggggatctaatagtagtttctttagtagattaaattggttgacccacttaaacttcaagtacccagcattgaacgtgactatgccaaacaatgaacaatttgacaaattgtacatttggggggttcaccacccgggtacggacaaggaccaaatcttcctgtatgctcaatcatcaggaagaatcacagtatctaccaaaagaagccaacaagctgtaatcccgaatatcggatctagacccagaataaggaatatccctagcagaataagcatctattggacaatagtaaaaccgggagacatacttttgattaacagcacagggaatctaattgctcctaggggttacttcaaaatacgaagtgggaaaagctcaataatgagatcagatgcacccattggcaaatgcaagtctgaatgcatcactccaaatggaagcattcccaatgacaaaccattccaaaatgtaaacaggatcacatacggggcctgtcccagatatgttaagcaaagcactctgaaattggcaacaggaatgcgaaatgtaccagagaaacaaactagaggcatatttggcgcaatagcgggtttcatagaaaatggttgggagggaatggtggatggttggtacggtttcaggcatcaaaattctgagggaagaggacaagcagcagatctcaaaagcactcaagcagcaatcgatcaaatcaatgggaagctgaatcgattgatcgggaaaaccaacgagaaattccatcagattgagaaagaattctcagaagtagaagggagaattcaggaccttgagaaatatgttgaggacacaaaaatagatctctggtcatacaacgcagagcttcttgttgccctggaaaaccaacatacaattgatctaactgactcagaaatgaacaaactgtttgaaaaaacaaagaagcaactgagggaaaatgctgaggatatgggcaatggttgtttcaaaatataccacaaatgtgacaatgcctgcataggatcaatcagaaatggaacttatgaccacgatgtatacagggatgaagcattaaacaaccggttccagatcaagggagttgagctgaagtcagggtacaaagattggatcctatggatttcctttgccatatcatgttttttgctttgtgttgctttgttggggttcatcatgtgggcctgccaaaagggcaacattaggtgcaacatttgcatttgagtgcattaattaaaaacacccttgtttctactggaagcggagccacgaacttctctctgttaaagcaagcaggagatgttgaagaaaaccccgggcctattttctaatatccacaaaatgaaggcaataattgtactactcatggtagtaacatccaatgcagatcgaatctgcactgggataacatcgtcaaactcaccacatgtcgtcaaaactgctactcaaggggaggtcaacgtgaccggtgtaataccactgacaacaacacccaccaaatctcattttgcaaatctcaaaggaacagaaaccagggggaaactatgcccaaaatgcctcaactgcacagatctggatgtagccttgggcagaccaaaatgcacagggaaaataccctctgcaagggtttcaatactccatgaagtcagacctgttacatctgggtgctttcctataatgcacgatagaacaaaaattagacagctgcctaaccttctccgaggatacgaacatgtcaggttatcaactcacaacgttatcaatgcaaaagatgcaccaggaagaccctacgaaattggaacctcagggtcttgccctaacattaccaatggaaacggattcttcgcaacaatggcttgggccgtcccaaaaaacaaaacagcaacaaatccattaacaatagaagtaccatacatttgtacagaaggagaagaccaaattaccgtttgggggttccactctgacaacgagacccaaatggcaaagctctatggggactcaaagccccagaagttcacctcatctgccaacggagtgaccacacattacgtttcacagattggtggcttcccaaatcaaacagaagacggaggactaccacaaagtggcagaattgttgttgattacatggtgcagaaatctggaaaaacaggaacaattacctatcaaagaggtattttattgcctcaaaaagtgtggtgcgcaagtggcaggagcaaggtaataaaaggatccttgcccttaattggagaagcagattgcctccatgaaaaatacggtggattaaacaaaagcaagccttactacacaggggaacatgcaaaggccataggaaattgcccaatatgggtgaaaacacccttgaagctggccaatggaaccaaatatagaccccctgcaaaactattaaaggaaagaggtttcttcggagccattgctggtttcttagagggaggatgggaaggaatgattgcaggttggcacggatacacatcccatggggcacatggagtagcggtggcagctgaccttaagagcactcaagaggccataaacaagataacaaaaaatctcaactctttgagtgagctggaagtaaagaatcttcaaagactaagcggtgccatggatgaactccacaacgaaatactagaactagatgagaaagtggatgatctcagagctgacacaataagctcacaaatagaactcgcagtcctgctttccaatgaaggaataataaacagtgaagatgaacatctcttggcgcttgaaagaaagctgaagaaaatgctgggcccctctgctgtagagatagggaatggatgctttgaaaccaaacacaagtgcaaccagacctgcctcgacagaatagctgctggtacctttgatgcaggagaattttctctccccacctttgattcactgaatattactgctgcatctttaaatgacgacggattggacaatcatactatactgctttactactcaactgctgcctccagtttggctgtaacactgatgatagctatctttgttgtttatatggtctccagagacaatgtttcttgctccatttgtctataaggaaagttaagccctgtattttcctttattgtagtgcttgtttgcttgttgtcattacaaagaaacgttattgaaaaattgatgactcgagctggtactgcatgcacgcaatgctagctgcccctttcccgtcctgggtaccccgagtctcccccgacctcgggtcccaggtatgctcccacctccacctgccccactcaccacctctgctagttccagacacctcccaagcacgcagcaatgcagctcaaaacgcttagcctagccacacccccacgggaaacagcagtgattaacctttagcaataaacgaaagtttaactaagctatactaaccccagggttggtcaatttcgtgccagccacaccctggagctagcaaaaaaaa

SEQ ID NO: 407 - DNA, 10279 bp, synthetic construct
  source 1..10279: mol_type = other DNA; note = Hybrid Vaccine Candidate 19
tagttattaatagtaatcaattacggggtcattagttcatagcccatatatggagttccgcgttacataacttacggtaaatggcccgcctggctgaccgcccaacgacccccgcccattgacgtcaataatgacgtatgttcccatagtaacgccaatagggactttccattgacgtcaatgggtggagtatttacggtaaactgcccacttggcagtacatcaagtgtatcatatgccaagtacgccccctattgacgtcaatgacggtaaatggcccgcctggcattatgcccagtacatgaccttatgggactttcctacttggcagtacatctacgtattagtcatcgctattaccatggtgatgcggttttggcagtacatcaatgggcgtggatagcggtttgactcacggggatttccaagtctccaccccattgacgtcaatgggagtttgttttggcaccaaaatcaacgggactttccaaaatgtcgtaacaactccgccccattgacgcaaatgggcggtaggcgtgtacggtgggaggtctatataagcagagctggtttagtgaaccgtcagatcgagaataaactagtattcttctggtccccacagactcagagagaacccgccaccatgttcgtgttcctggtgctgctgcccctggtgagcagccagtgcgtgaacctgaccaccaggacccagctgccccccgcctacaccaacagcttcaccaggggcgtgtactaccccgacaaggtgttcaggagcagcgtgctgcacagcacccaggacctgttcctgcccttcttcagcaacgtgacctggttccacgccatccacgtgagcggcaccaacggcaccaagaggttcgacaaccccgtgctgcccttcaacgacggcgtgtacttcgccagcaccgagaagagcaacatcatcaggggctggatcttcggcaccaccctggacagcaagacccagagcctgctgatcgtgaacaacgccaccaacgtggtgatcaaggtgtgcgagttccagttctgcaacgaccccttcctgggcgtgtactaccacaagaacaacaagagctggatggagagcgagttcagggtgtacagcagcgccaacaactgcaccttcgagtacgtgagccagcccttcctgatggacctggagggcaagcagggcaacttcaagaacctgagggagttcgtgttcaagaacatcgacggctacttcaagatctacagcaagcacacccccatcaacctggtgagggacctgccccagggcttcagcgccctggagcccctggtggacctgcccatcggcatcaacatcaccaggttccagaccctgctggccctgcacaggagctacctgacccccggcgacagcagcagcggctggaccgccggcgccgccgcctactacgtgggctacctgcagcccaggaccttcctgctgaagtacaacgagaacggcaccatcaccgacgccgtggactgcgccctggaccccctgagcgagaccaagtgcaccctgaagagcttcaccgtggagaagggcatctaccagaccagcaacttcagggtgcagcccaccgagagcatcgtgaggttccccaacatcaccaacctgtgccccttcggcgaggtgttcaacgccaccaggttcgccagcgtgtacgcctggaacaggaagaggatcagcaactgcgtggccgactacagcgtgctgtacaacagcgccagcttcagcaccttcaagtgctacggcgtgagccccaccaagctgaacgacctgtgcttcaccaacgtgtacgccgacagcttcgtgatcaggggcgacgaggtgaggcagatcgcccccggccagaccggcaagatcgccgactacaactacaagctgcccgacgacttcaccggctgcgtgatcgcctggaacagcaacaacctggacagcaaggtgggcggcaactacaactacctgtacaggctgttcaggaagagcaacctgaagcccttcgagagggacatcagcaccgagatctaccaggccggcagcaccccctgcaacggcgtggagggcttcaactgctacttccccctgcagagctacggcttccagcccaccaacggcgtgggctaccagccctacagggtggtggtgctgagcttcgagctgctgcacgcccccgccaccgtgtgcggccccaagaagagcaccaacctggtgaagaacaagtgcgtgaacttcaacttcaacggcctgaccggcaccggcgtgctgaccgagagcaacaagaagttcctgcccttccagcagttcggcagggacatcgccgacaccaccgacgccgtgagggacccccagaccctggagatcctggacatcaccccctgcagcttcggcggcgtgagcgtgatcacccccggcaccaacaccagcaaccaggtggccgtgctgtaccaggacgtgaactgcaccgaggtgcccgtggccatccacgccgaccagctgacccccacctggagggtgtacagcaccggcagcaacgtgttccagaccagggccggctgcctgatcggcgccgagcacgtgaacaacagctacgagtgcgacatccccatcggcgccggcatctgcgccagctaccagacccagaccaacagccccggcagcgccagcagcgtggccagccagagcatcatcgcctacaccatgagcctgggcgccgagaacagcgtggcctacagcaacaacagcatcgccatccccaccaacttcaccatcagcgtgaccaccgagatcctgcccgtgagcatgaccaagaccagcgtggactgcaccatgtacatctgcggcgacagcaccgagtgcagcaacctgctgctgcagtacggcagcttctgcacccagctgaacagggccctgaccggcatcgccgtggagcaggacaagaacacccaggaggtgttcgcccaggtgaagcagatctacaagaccccccccatcaaggacttcggcggcttcaacttcagccagatcctgcccgaccccagcaagcccagcaagaggagccccatcgaggacctgctgttcaacaaggtgaccctggccgacgccggcttcatcaagcagtacggcgactgcctgggcgacatcgccgccagggacctgatctgcgcccagaagttcaacggcctgaccgtgctgccccccctgctgaccgacgagatgatcgcccagtacaccagcgccctgctggccggcaccatcaccagcggctggaccttcggcgccggccccgccctgcagatccccttccccatgcagatggcctacaggttcaacggcatcggcgtgacccagaacgtgctgtacgagaaccagaagctgatcgccaaccagttcaacagcgccatcggcaagatccaggacagcctgagcagcacccccagcgccctgggcaagctgcaggacgtggtgaaccagaacgcccaggccctgaacaccctggtgaagcagctgagcagcaacttcggcgccatcagcagcgtgctgaacgacatcctgagcaggctggacccccccgaggccgaggtgcagatcgacaggctgatcaccggcaggctgcagagcctgcagacctacgtgacccagcagctgatcagggccgccgagatcagggccagcgccaacctggccgccaccaagatgagcgagtgcgtgctgggccagagcaagagggtggacttctgcggcaagggctaccacctgatgagcttcccccagagcgccccccacggcgtggtgttcctgcacgtgacctacgtgcccgcccaggagaagaacttcaccaccgcccccgccatctgccacgacggcaaggcccacttccccagggagggcgtgttcgtgagcaacggcacccactggttcgtgacccagaggaacttctacgagccccagatcatcaccaccgacaacaccttcgtgagcggcaactgcgacgtggtgatcggcatcgtgaacaacaccgtgtacgaccccctgcagcccgagctggacagcttcaaggaggagctggacaagtacttcaagaaccacaccagccccgacgtggacctgggcgacatcagcggcatcaacgccagcgtggtgaacatccagaaggagatcgacaggctgaacgaggtggccaagaacctgaacgagagcctgatcgacctgcaggagctgggcaagtacgagcagtacatcaagtggccctggtacatctggctgggcttcatcgccggcctgatcgccatcgtgatggtgaccatcatgctgtgctgcatgaccagctgctgcagctgcctgaagggctgctgcagctgcggcagctgctgcaagttcgacgaggacgacagcgagcccgtgctgaagggcgtgaagctgcactacaccggaagcggagccacgaacttctctctgttaaagcaagcaggagatgttgaagaaaaccccgggcctatgaaggcaatactagtagttctgctatatacatttgcaaccgcaaatgcagacacattatgtataggttatcatgcgaacaactcaacagacactgtagacacagtactagaaaagaatgtaacagtaacacactctgttaaccttctagaagacaagcataacgggaaactatgcaaactaagaggggtagccccattgcatttgggtaaatgtaacattgctggctggatcctgggaaatccagagtgtgaatcactctccacagcaagctcatggtcctacattgtggaaacatctagttcagacaatggaacgtgttacccaggagatttcatcgattatgaggagctaagagagcaattgagctcagtgtcatcatttgaaaggtttgagatattccccaagacaagttcatggcccaatcatgactcgaacaaaggtgtaacgacagcatgtcctcatgctggagcaaaaagcttctacaaaaatttaatatggctagttaaaaaaggaaattcatacccaaagctcagcaaatcctacattaatgataaagggaaagaagtcctcgtgctatggggcattcaccatccacctactagtgctgaccaacaaagtctctatcagaatgcagatgcatatgtttttgtggggacatcaagatacagcaagaagttcaagccggaaatagcaataaggcccaaagtgagggatcaagaagggagaatgaactattactggacactagtagagccgggagacaaaataacattcgaagcaactggaaatctagtggtaccgagatatgcattcgcaatggaaagaaatgctggatctggtattatcatttcagatacaccagtccacgattgcaatacaacttgtcagacacccaagggtgctataaacaccagcctcccatttcagaacatacatccgatcacaattggaaaatgtccaaaatatgtaaaaagcacaaaattgagactggccacaggattgaggaatgtcccgtccattcaatctagaggcctatttggggccattgccggtttcattgaaggggggtggacagggatggtagatggatggtacggttatcaccatcaaaatgagcaggggtcaggatatgcagccgacctgaagagcacacagaatgccattgacgagattactaacaaagtaaactctgttattgaaaaaatgaatacacagttcacagcagtaggtaaagagttcaaccacctggaaaaaagaatagagaatttaaataaaaaagttgatgatggtttcctggacatttggacttacaatgccgaactgttggttctattggaaaatgaaagaactttggactaccacgattcaaaggtgaagaacttatatgaaaaggtaagaagccagttaaaaaacaatgccaaggaaattggaaacggctgctttgaattttaccacaaatgtgataacacgtgcatggaaagtgtcaaaaatgggacttatgactacccaaaatactcagaggaagcaaaattaaacagagaagaaatagatggggtaaagctggaatcaacaaggatttaccagattttggcgatctattcaaccgtcgccagttcattggtactggtagtctccctgggggcaatcagtttctggatgtgctctaatgggtctctacagtgtagaatatgtatttaaggaagcggagccacgaacttctctctgttaaagcaagcaggagatgttgaagaaaaccccgggcctagcaaaagcaggggataattctattaaccatgaagactatcattgctttgagctacattctatgtctggttttcgctcaaaaacttcctggaaatgacaatagcactgcaacgctgtgccttgggcaccatgcagtaccaaacggaacgatagtgaaaacaatcacgaatgaccaaattgaagttactaatgctactgagctggttcagaattcctcaataggtgaaatatgcgacagtcctcatcagatccttgatggagaaaactgcacactaatagatgctctattgggagaccctcagtgtgatggctttcaaaataagaaatgggacctttttgttgaacgaagcaaagcctacagcaactgttacccttatgatgtgccggattatgcctcccttaggtcactagttgcctcatccggcacactggagtttaacaatgaaagcttcaattgggctggagtcactcaaaacggaacaagttctgcttgcataaggggatctaatagtagtttctttagtagattaaattggttgacccacttaaacttcaagtacccagcattgaacgtgactatgccaaacaatgaacaatttgacaaattgtacatttggggggttcaccacccgggtacggacaaggaccaaatcttcctgtatgctcaatcatcaggaagaatcacagtatctaccaaaagaagccaacaagctgtaatcccgaatatcggatctagacccagaataaggaatatccctagcagaataagcatctattggacaatagtaaaaccgggagacatacttttgattaacagcacagggaatctaattgctcctaggggttacttcaaaatacgaagtgggaaaagctcaataatgagatcagatgcacccattggcaaatgcaagtctgaatgcatcactccaaatggaagcattcccaatgacaaaccattccaaaatgtaaacaggatcacatacggggcctgtcccagatatgttaagcaaagcactctgaaattggcaacaggaatgcgaaatgtaccagagaaacaaactagaggcatatttggcgcaatagcgggtttcatagaaaatggttgggagggaatggtggatggttggtacggtttcaggcatcaaaattctgagggaagaggacaagcagcagatctcaaaagcactcaagcagcaatcgatcaaatcaatgggaagctgaatcgattgatcgggaaaaccaacgagaaattccatcagattgagaaagaattctcagaagtagaagggagaattcaggaccttgagaaatatgttgaggacacaaaaatagatctctggtcatacaacgcagagcttcttgttgccctggaaaaccaacatacaattgatctaactgactcagaaatgaacaaactgtttgaaaaaacaaagaagcaactgagggaaaatgctgaggatatgggcaatggttgtttcaaaatataccacaaatgtgacaatgcctgcataggatcaatcagaaatggaacttatgaccacgatgtatacagggatgaagcattaaacaaccggttccagatcaagggagttgagctgaagtcagggtacaaagattggatcctatggatttcctttgccatatcatgttttttgctttgtgttgctttgttggggttcatcatgtgggcctgccaaaagggcaacattaggtgcaacatttgcatttgagtgcattaattaaaaacacccttgtttctactggaagcggagccacgaacttctctctgttaaagcaagcaggagatgttgaagaaaaccccgggcctattttctaatatccacaaaatgaaggcaataattgtactactcatggtagtaacatccaatgcagatcgaatctgcactgggataacatcgtcaaactcaccacatgtcgtcaaaactgctactcaaggggaggtcaacgtgaccggtgtaataccactgacaacaacacccaccaaatctcattttgcaaatctcaaaggaacagaaaccagggggaaactatgcccaaaatgcctcaactgcacagatctggatgtagccttgggcagaccaaaatgcacagggaaaataccctctgcaagggtttcaatactccatgaagtcagacctgttacatctgggtgctttcctataatgcacgatagaacaaaaattagacagctgcctaaccttctccgaggatacgaacatgtcaggttatcaactcacaacgttatcaatgcaaaagatgcaccaggaagaccctacgaaattggaacctcagggtcttgccctaacattaccaatggaaacggattcttcgcaacaatggcttgggccgtcccaaaaaacaaaacagcaacaaatccattaacaatagaagtaccatacatttgtacagaaggagaagaccaaattaccgtttgggggttccactctgacaacgagacccaaatggcaaagctctatggggactcaaagccccagaagttcacctcatctgccaacggagtgaccacacattacgtttcacagattggtggcttcccaaatcaaacagaagacggaggactaccacaaagtggcagaattgttgttgattacatggtgcagaaatctggaaaaacaggaacaattacctatcaaagaggtattttattgcctcaaaaagtgtggtgcgcaagtggcaggagcaaggtaataaaaggatccttgcccttaattggagaagcagattgcctccatgaaaaatacggtggattaaacaaaagcaagccttactacacaggggaacatgcaaaggccataggaaattgcccaatatgggtgaaaacacccttgaagctggccaatggaaccaaatatagaccccctgcaaaactattaaaggaaagaggtttcttcggagccattgctggtttcttagagggaggatgggaaggaatgattgcaggttggcacggatacacatcccatggggcacatggagtagcggtggcagctgaccttaagagcactcaagaggccataaacaagataacaaaaaatctcaactctttgagtgagctggaagtaaagaatcttcaaagactaagcggtgccatggatgaactccacaacgaaatactagaactagatgagaaagtggatgatctcagagctgacacaataagctcacaaatagaactcgcagtcctgctttccaatgaaggaataataaacagtgaagatgaacatctcttggcgcttgaaagaaagctgaagaaaatgctgggcccctctgctgtagagatagggaatggatgctttgaaaccaaacacaagtgcaaccagacctgcctcgacagaatagctgctggtacctttgatgcaggagaattttctctccccacctttgattcactgaatattactgctgcatctttaaatgacgacggattggacaatcatactatactgctttactactcaactgctgcctccagtttggctgtaacactgatgatagctatctttgttgtttatatggtctccagagacaatgtttcttgctccatttgtctataaggaaagttaagccctgtattttcctttattgtagtgcttgtttgcttgttgtcattacaaagaaacgttattgaaaaattgatgactcgagctggtactgcatgcacgcaatgctagctgcccctttcccgtcctgggtaccccgagtctcccccgacctcgggtcccaggtatgctcccacctccacctgccccactcaccacctctgctagttccagacacctcccaagcacgcagcaatgcagctcaaaacgcttagcctagccacacccccacgggaaacagcagtgattaacctttagcaataaacgaaagtttaactaagctatactaaccccagggttggtcaatttcgtgccagccacaccctggagctagcaaaaaaaa

SEQ ID NO: 408 - DNA, 10279 bp, synthetic construct
  source 1..10279: mol_type = other DNA; note = Hybrid Vaccine Candidate 20
tagttattaatagtaatcaattacggggtcattagttcatagcccatatatggagttccgcgttacataacttacggtaaatggcccgcctggctgaccgcccaacgacccccgcccattgacgtcaataatgacgtatgttcccatagtaacgccaatagggactttccattgacgtcaatgggtggagtatttacggtaaactgcccacttggcagtacatcaagtgtatcatatgccaagtacgccccctattgacgtcaatgacggtaaatggcccgcctggcattatgcccagtacatgaccttatgggactttcctacttggcagtacatctacgtattagtcatcgctattaccatggtgatgcggttttggcagtacatcaatgggcgtggatagcggtttgactcacggggatttccaagtctccaccccattgacgtcaatgggagtttgttttggcaccaaaatcaacgggactttccaaaatgtcgtaacaactccgccccattgacgcaaatgggcggtaggcgtgtacggtgggaggtctatataagcagagctggtttagtgaaccgtcagatcgagaataaactagtattcttctggtccccacagactcagagagaacccgccaccatgttcgtgttcctggtgctgctgcccctggtgagcagccagtgcgtgaacctgaccaccaggacccagctgccccccgcctacaccaacagcttcaccaggggcgtgtactaccccgacaaggtgttcaggagcagcgtgctgcacagcacccaggacctgttcctgcccttcttcagcaacgtgacctggttccacgccatccacgtgagcggcaccaacggcaccaagaggttcgacaaccccgtgctgcccttcaacgacggcgtgtacttcgccagcaccgagaagagcaacatcatcaggggctggatcttcggcaccaccctggacagcaagacccagagcctgctgatcgtgaacaacgccaccaacgtggtgatcaaggtgtgcgagttccagttctgcaacgaccccttcctgggcgtgtactaccacaagaacaacaagagctggatggagagcgagttcagggtgtacagcagcgccaacaactgcaccttcgagtacgtgagccagcccttcctgatggacctggagggcaagcagggcaacttcaagaacctgagggagttcgtgttcaagaacatcgacggctacttcaagatctacagcaagcacacccccatcaacctggtgagggacctgccccagggcttcagcgccctggagcccctggtggacctgcccatcggcatcaacatcaccaggttccagaccctgctggccctgcacaggagctacctgacccccggcgacagcagcagcggctggaccgccggcgccgccgcctactacgtgggctacctgcagcccaggaccttcctgctgaagtacaacgagaacggcaccatcaccgacgccgtggactgcgccctggaccccctgagcgagaccaagtgcaccctgaagagcttcaccgtggagaagggcatctaccagaccagcaacttcagggtgcagcccaccgagagcatcgtgaggttccccaacatcaccaacctgtgccccttcggcgaggtgttcaacgccaccaggttcgccagcgtgtacgcctggaacaggaagaggatcagcaactgcgtggccgactacagcgtgctgtacaacagcgccagcttcagcaccttcaagtgctacggcgtgagccccaccaagctgaacgacctgtgcttcaccaacgtgtacgccgacagcttcgtgatcaggggcgacgaggtgaggcagatcgcccccggccagaccggcaagatcgccgactacaactacaagctgcccgacgacttcaccggctgcgtgatcgcctggaacagcaacaacctggacagcaaggtgggcggcaactacaactacctgtacaggctgttcaggaagagcaacctgaagcccttcgagagggacatcagcaccgagatctaccaggccggcagcaccccctgcaacggcgtggagggcttcaactgctacttccccctgcagagctacggcttccagcccaccaacggcgtgggctaccagccctacagggtggtggtgctgagcttcgagctgctgcacgcccccgccaccgtgtgcggccccaagaagagcaccaacctggtgaagaacaagtgcgtgaacttcaacttcaacggcctgaccggcaccggcgtgctgaccgagagcaacaagaagttcctgcccttccagcagttcggcagggacatcgccgacaccaccgacgccgtgagggacccccagaccctggagatcctggacatcaccccctgcagcttcggcggcgtgagcgtgatcacccccggcaccaacaccagcaaccaggtggccgtgctgtaccaggacgtgaactgcaccgaggtgcccgtggccatccacgccgaccagctgacccccacctggagggtgtacagcaccggcagcaacgtgttccagaccagggccggctgcctgatcggcgccgagcacgtgaacaacagctacgagtgcgacatccccatcggcgccggcatctgcgccagctaccagacccagaccaacagccccaggagggccaggagcgtggccagccagagcatcatcgcctacaccatgagcctgggcgccgagaacagcgtggcctacagcaacaacagcatcgccatccccaccaacttcaccatcagcgtgaccaccgagatcctgcccgtgagcatgaccaagaccagcgtggactgcaccatgtacatctgcggcgacagcaccgagtgcagcaacctgctgctgcagtacggcagcttctgcacccagctgaacagggccctgaccggcatcgccgtggagcaggacaagaacacccaggaggtgttcgcccaggtgaagcagatctacaagaccccccccatcaaggacttcggcggcttcaacttcagccagatcctgcccgaccccagcaagcccagcaagaggagcttcatcgaggacctgctgttcaacaaggtgaccctggccgacgccggcttcatcaagcagtacggcgactgcctgggcgacatcgccgccagggacctgatctgcgcccagaagttcaacggcctgaccgtgctgccccccctgctgaccgacgagatgatcgcccagtacaccagcgccctgctggccggcaccatcaccagcggctggaccttcggcgccggcgccgccctgcagatccccttcgccatgcagatggcctacaggttcaacggcatcggcgtgacccagaacgtgctgtacgagaaccagaagctgatcgccaaccagttcaacagcgccatcggcaagatccaggacagcctgagcagcaccgccagcgccctgggcaagctgcaggacgtggtgaaccagaacgcccaggccctgaacaccctggtgaagcagctgagcagcaacttcggcgccatcagcagcgtgctgaacgacatcctgagcaggctggacccccccgaggccgaggtgcagatcgacaggctgatcaccggcaggctgcagagcctgcagacctacgtgacccagcagctgatcagggccgccgagatcagggccagcgccaacctggccgccaccaagatgagcgagtgcgtgctgggccagagcaagagggtggacttctgcggcaagggctaccacctgatgagcttcccccagagcgccccccacggcgtggtgttcctgcacgtgacctacgtgcccgcccaggagaagaacttcaccaccgcccccgccatctgccacgacggcaaggcccacttccccagggagggcgtgttcgtgagcaacggcacccactggttcgtgacccagaggaacttctacgagccccagatcatcaccaccgacaacaccttcgtgagcggcaactgcgacgtggtgatcggcatcgtgaacaacaccgtgtacgaccccctgcagcccgagctggacagcttcaaggaggagctggacaagtacttcaagaaccacaccagccccgacgtggacctgggcgacatcagcggcatcaacgccagcgtggtgaacatccagaaggagatcgacaggctgaacgaggtggccaagaacctgaacgagagcctgatcgacctgcaggagctgggcaagtacgagcagtacatcaagtggccctggtacatctggctgggcttcatcgccggcctgatcgccatcgtgatggtgaccatcatgctgtgctgcatgaccagctgctgcagctgcctgaagggctgctgcagctgcggcagctgctgcaagttcgacgaggacgacagcgagcccgtgctgaagggcgtgaagctgcactacaccggaagcggagccacgaacttctctctgttaaagcaagcaggagatgttgaagaaaaccccgggcctatgaaggcaatactagtagttctgctatatacatttgcaaccgcaaatgcagacacattatgtataggttatcatgcgaacaactcaacagacactgtagacacagtactagaaaagaatgtaacagtaacacactctgttaaccttctagaagacaagcataacgggaaactatgcaaactaagaggggtagccccattgcatttgggtaaatgtaacattgctggctggatcctgggaaatccagagtgtgaatcactctccacagcaagctcatggtcctacattgtggaaacatctagttcagacaatggaacgtgttacccaggagatttcatcgattatgaggagctaagagagcaattgagctcagtgtcatcatttgaaaggtttgagatattccccaagacaagttcatggcccaatcatgactcgaacaaaggtgtaacgacagcatgtcctcatgctggagcaaaaagcttctacaaaaatttaatatggctagttaaaaaaggaaattcatacccaaagctcagcaaatcctacattaatgataaagggaaagaagtcctcgtgctatggggcattcaccatccacctactagtgctgaccaacaaagtctctatcagaatgcagatgcatatgtttttgtggggacatcaagatacagcaagaagttcaagccggaaatagcaataaggcccaaagtgagggatcaagaagggagaatgaactattactggacactagtagagccgggagacaaaataacattcgaagcaactggaaatctagtggtaccgagatatgcattcgcaatggaaagaaatgctggatctggtattatcatttcagatacaccagtccacgattgcaatacaacttgtcagacacccaagggtgctataaacaccagcctcccatttcagaacatacatccgatcacaattggaaaatgtccaaaatatgtaaaaagcacaaaattgagactggccacaggattgaggaatgtcccgtccattcaatctagaggcctatttggggccattgccggtttcattgaaggggggtggacagggatggtagatggatggtacggttatcaccatcaaaatgagcaggggtcaggatatgcagccgacctgaagagcacacagaatgccattgacgagattactaacaaagtaaactctgttattgaaaaaatgaatacacagttcacagcagtaggtaaagagttcaaccacctggaaaaaagaatagagaatttaaataaaaaagttgatgatggtttcctggacatttggacttacaatgccgaactgttggttctattggaaaatgaaagaactttggactaccacgattcaaaggtgaagaacttatatgaaaaggtaagaagccagttaaaaaacaatgccaaggaaattggaaacggctgctttgaattttaccacaaatgtgataacacgtgcatggaaagtgtcaaaaatgggacttatgactacccaaaatactcagaggaagcaaaattaaacagagaagaaatagatggggtaaagctggaatcaacaaggatttaccagattttggcgatctattcaaccgtcgccagttcattggtactggtagtctccctgggggcaatcagtttctggatgtgctctaatgggtctctacagtgtagaatatgtatttaaggaagcggagccacgaacttctctctgttaaagcaagcaggagatgttgaagaaaaccccgggcctagcaaaagcaggggataattctattaaccatgaagactatcattgctttgagctacattctatgtctggttttcgctcaaaaacttcctggaaatgacaatagcactgcaacgctgtgccttgggcaccatgcagtaccaaacggaacgatagtgaaaacaatcacgaatgaccaaattgaagttactaatgctactgagctggttcagaattcctcaataggtgaaatatgcgacagtcctcatcagatccttgatggagaaaactgcacactaatagatgctctattgggagaccctcagtgtgatggctttcaaaataagaaatgggacctttttgttgaacgaagcaaagcctacagcaactgttacccttatgatgtgccggattatgcctcccttaggtcactagttgcctcatccggcacactggagtttaacaatgaaagcttcaattgggctggagtcactcaaaacggaacaagttctgcttgcataaggggatctaatagtagtttctttagtagattaaattggttgacccacttaaacttcaagtacccagcattgaacgtgactatgccaaacaatgaacaatttgacaaattgtacatttggggggttcaccacccgggtacggacaaggaccaaatcttcctgtatgctcaatcatcaggaagaatcacagtatctaccaaaagaagccaacaagctgtaatcccgaatatcggatctagacccagaataaggaatatccctagcagaataagcatctattggacaatagtaaaaccgggagacatacttttgattaacagcacagggaatctaattgctcctaggggttacttcaaaatacgaagtgggaaaagctcaataatgagatcagatgcacccattggcaaatgcaagtctgaatgcatcactccaaatggaagcattcccaatgacaaaccattccaaaatgtaaacaggatcacatacggggcctgtcccagatatgttaagcaaagcactctgaaattggcaacaggaatgcgaaatgtaccagagaaacaaactagaggcatatttggcgcaatagcgggtttcatagaaaatggttgggagggaatggtggatggttggtacggtttcaggcatcaaaattctgagggaagaggacaagcagcagatctcaaaagcactcaagcagcaatcgatcaaatcaatgggaagctgaatcgattgatcgggaaaaccaacgagaaattccatcagattgagaaagaattctcagaagtagaagggagaattcaggaccttgagaaatatgttgaggacacaaaaatagatctctggtcatacaacgcagagcttcttgttgccctggaaaaccaacatacaattgatctaactgactcagaaatgaacaaactgtttgaaaaaacaaagaagcaactgagggaaaatgctgaggatatgggcaatggttgtttcaaaatataccacaaatgtgacaatgcctgcataggatcaatcagaaatggaacttatgaccacgatgtatacagggatgaagcattaaacaaccggttccagatcaagggagttgagctgaagtcagggtacaaagattggatcctatggatttcctttgccatatcatgttttttgctttgtgttgctttgttggggttcatcatgtgggcctgccaaaagggcaacattaggtgcaacatttgcatttgagtgcattaattaaaaacacccttgtttctactggaagcggagccacgaacttctctctgttaaagcaagcaggagatgttgaagaaaaccccgggcctattttctaatatccacaaaatgaaggcaataattgtactactcatggtagtaacatccaatgcagatcgaatctgcactgggataacatcgtcaaactcaccacatgtcgtcaaaactgctactcaaggggaggtcaacgtgaccggtgtaataccactgacaacaacacccaccaaatctcattttgcaaatctcaaaggaacagaaaccagggggaaactatgcccaaaatgcctcaactgcacagatctggatgtagccttgggcagaccaaaatgcacagggaaaataccctctgcaagggtttcaatactccatgaagtcagacctgttacatctgggtgctttcctataatgcacgatagaacaaaaattagacagctgcctaaccttctccgaggatacgaacatgtcaggttatcaactcacaacgttatcaatgcaaaagatgcaccaggaagaccctacgaaattggaacctcagggtcttgccctaacattaccaatggaaacggattcttcgcaacaatggcttgggccgtcccaaaaaacaaaacagcaacaaatccattaacaatagaagtaccatacatttgtacagaaggagaagaccaaattaccgtttgggggttccactctgacaacgagacccaaatggcaaagctctatggggactcaaagccccagaagttcacctcatctgccaacggagtgaccacacattacgtttcacagattggtggcttcccaaatcaaacagaagacggaggactaccacaaagtggcagaattgttgttgattacatggtgcagaaatctggaaaaacaggaacaattacctatcaaagaggtattttattgcctcaaaaagtgtggtgcgcaagtggcaggagcaaggtaataaaaggatccttgcccttaattggagaagcagattgcctccatgaaaaatacggtggattaaacaaaagcaagccttactacacaggggaacatgcaaaggccataggaaattgcccaatatgggtgaaaacacccttgaagctggccaatggaaccaaatatagaccccctgcaaaactattaaaggaaagaggtttcttcggagccattgctggtttcttagagggaggatgggaaggaatgattgcaggttggcacggatacacatcccatggggcacatggagtagcggtggcagctgaccttaagagcactcaagaggccataaacaagataacaaaaaatctcaactctttgagtgagctggaagtaaagaatcttcaaagactaagcggtgccatggatgaactccacaacgaaatactagaactagatgagaaagtggatgatctcagagctgacacaataagctcacaaatagaactcgcagtcctgctttccaatgaaggaataataaacagtgaagatgaacatctcttggcgcttgaaagaaagctgaagaaaatgctgggcccctctgctgtagagatagggaatggatgctttgaaaccaaacacaagtgcaaccagacctgcctcgacagaatagctgctggtacctttgatgcaggagaattttctctccccacctttgattcactgaatattactgctgcatctttaaatgacgacggattggacaatcatactatactgctttactactcaactgctgcctccagtttggctgtaacactgatgatagctatctttgttgtttatatggtctccagagacaatgtttcttgctccatttgtctataaggaaagttaagccctgtattttcctttattgtagtgcttgtttgcttgttgtcattacaaagaaacgttattgaaaaattgatgactcgagctggtactgcatgcacgcaatgctagctgcccctttcccgtcctgggtaccccgagtctcccccgacctcgggtcccaggtatgctcccacctccacctgccccactcaccacctctgctagttccagacacctcccaagcacgcagcaatgcagctcaaaacgcttagcctagccacacccccacgggaaacagcagtgattaacctttagcaataaacgaaagtttaactaagctatactaaccccagggttggtcaatttcgtgccagccacaccctggagctagcaaaaaaaa

SEQ ID NO: 409 - DNA, 11423 bp, synthetic construct
  source 1..11423: mol_type = other DNA; note = Hybrid Vaccine Candidate 21
ctcgacattgattattgactagttattaatagtaatcaattacggggtcattagttcatagcccatatatggagttccgcgttacataacttacggtaaatggcccgcctggctgaccgcccaacgacccccgcccattgacgtcaataatgacgtatgttcccatagtaacgccaatagggactttccattgacgtcaatgggtggagtatttacggtaaactgcccacttggcagtacatcaagtgtatcatatgccaagtacgccccctattgacgtcaatgacggtaaatggcccgcctggcattatgcccagtacatgaccttatgggactttcctacttggcagtacatctacgtattagtcatcgctattaccatggtcgaggtgagccccacgttctgcttcactctccccatctcccccccctccccacccccaattttgtatttatttattttttaattattttgtgcagcgatgggggcggggggggggggggggcgcgcgccaggcggggcggggcggggcgaggggcggggcggggcgaggcggagaggtgcggcggcagccaatcagagcggcgcgctccgaaagtttccttttatggcgaggcggcggcggcggcggccctataaaaagcgaagcgcgcggcgggcgggagtcgctgcgcgctgccttcgccccgtgccccgctccgccgccgcctcgcgccgcccgccccggctctgactgaccgcgttactcccacaggtgagcgggcgggacggcccttctcctccgggctgtaattagcgcttggtttaatgacggcttgtttcttttctgtggctgcgtgaaagccttgaggggctccgggagggccctttgtgcggggggagcggctcggggggtgcgtgcgtgtgtgtgtgcgtggggagcgccgcgtgcggctccgcgctgcccggcggctgtgagcgctgcgggcgcggcgcggggctttgtgcgctccgcagtgtgcgcgaggggagcgcggccgggggcggtgccccgcggtgcggggggggctgcgaggggaacaaaggctgcgtgcggggtgtgtgcgtgggggggtgagcagggggtgtgggcgcgtcggtcgggctgcaaccccccctgcacccccctccccgagttgctgagcacggcccggcttcgggtgcggggctccgtacggggcgtggcgcggggctcgccgtgccgggcggggggtggcggcaggtgggggtgccgggcggggcggggccgcctcgggccggggagggctcgggggaggggcgcggcggcccccggagcgccggcggctgtcgaggcgcggcgagccgcagccattgccttttatggtaatcgtgcgagagggcgcagggacttcctttgtcccaaatctgtgcggagccgaaatctgggaggcgccgccgcaccccctctagcgggcgcggggcgaagcggtgcggcgccggcaggaaggaaatgggcggggagggccttcgtgcgtcgccgcgccgccgtccccttctccctctccagcctcggggctgtccgcggggggacggctgccttcgggggggacggggcagggcggggttcggcttctggcgtgtgaccggcggctctagagcctctgctaaccatgttcatgccttcttctttttcctacagctcctgggcaacgtgctggttattgtgctgtctcatcattttggcaaagaattggagaataaactagtattcttctggtccccacagactcagagagaacccgccaccatgttcgtgttcctggtgctgctgcccctggtgagcagccagtgcgtgaacctgaccaccaggacccagctgccccccgcctacaccaacagcttcaccaggggcgtgtactaccccgacaaggtgttcaggagcagcgtgctgcacagcacccaggacctgttcctgcccttcttcagcaacgtgacctggttccacgccatccacgtgagcggcaccaacggcaccaagaggttcgacaaccccgtgctgcccttcaacgacggcgtgtacttcgccagcaccgagaagagcaacatcatcaggggctggatcttcggcaccaccctggacagcaagacccagagcctgctgatcgtgaacaacgccaccaacgtggtgatcaaggtgtgcgagttccagttctgcaacgaccccttcctgggcgtgtactaccacaagaacaacaagagctggatggagagcgagttcagggtgtacagcagcgccaacaactgcaccttcgagtacgtgagccagcccttcctgatggacctggagggcaagcagggcaacttcaagaacctgagggagttcgtgttcaagaacatcgacggctacttcaagatctacagcaagcacacccccatcaacctggtgagggacctgccccagggcttcagcgccctggagcccctggtggacctgcccatcggcatcaacatcaccaggttccagaccctgctggccctgcacaggagctacctgacccccggcgacagcagcagcggctggaccgccggcgccgccgcctactacgtgggctacctgcagcccaggaccttcctgctgaagtacaacgagaacggcaccatcaccgacgccgtggactgcgccctggaccccctgagcgagaccaagtgcaccctgaagagcttcaccgtggagaagggcatctaccagaccagcaacttcagggtgcagcccaccgagagcatcgtgaggttccccaacatcaccaacctgtgccccttcggcgaggtgttcaacgccaccaggttcgccagcgtgtacgcctggaacaggaagaggatcagcaactgcgtggccgactacagcgtgctgtacaacagcgccagcttcagcaccttcaagtgctacggcgtgagccccaccaagctgaacgacctgtgcttcaccaacgtgtacgccgacagcttcgtgatcaggggcgacgaggtgaggcagatcgcccccggccagaccggcaagatcgccgactacaactacaagctgcccgacgacttcaccggctgcgtgatcgcctggaacagcaacaacctggacagcaaggtgggcggcaactacaactacctgtacaggctgttcaggaagagcaacctgaagcccttcgagagggacatcagcaccgagatctaccaggccggcagcaccccctgcaacggcgtggagggcttcaactgctacttccccctgcagagctacggcttccagcccaccaacggcgtgggctaccagccctacagggtggtggtgctgagcttcgagctgctgcacgcccccgccaccgtgtgcggccccaagaagagcaccaacctggtgaagaacaagtgcgtgaacttcaacttcaacggcctgaccggcaccggcgtgctgaccgagagcaacaagaagttcctgcccttccagcagttcggcagggacatcgccgacaccaccgacgccgtgagggacccccagaccctggagatcctggacatcaccccctgcagcttcggcggcgtgagcgtgatcacccccggcaccaacaccagcaaccaggtggccgtgctgtaccaggacgtgaactgcaccgaggtgcccgtggccatccacgccgaccagctgacccccacctggagggtgtacagcaccggcagcaacgtgttccagaccagggccggctgcctgatcggcgccgagcacgtgaacaacagctacgagtgcgacatccccatcggcgccggcatctgcgccagctaccagacccagaccaacagccccggcagcgccagcagcgtggccagccagagcatcatcgcctacaccatgagcctgggcgccgagaacagcgtggcctacagcaacaacagcatcgccatccccaccaacttcaccatcagcgtgaccaccgagatcctgcccgtgagcatgaccaagaccagcgtggactgcaccatgtacatctgcggcgacagcaccgagtgcagcaacctgctgctgcagtacggcagcttctgcacccagctgaacagggccctgaccggcatcgccgtggagcaggacaagaacacccaggaggtgttcgcccaggtgaagcagatctacaagaccccccccatcaaggacttcggcggcttcaacttcagccagatcctgcccgaccccagcaagcccagcaagaggagccccatcgaggacctgctgttcaacaaggtgaccctggccgacgccggcttcatcaagcagtacggcgactgcctgggcgacatcgccgccagggacctgatctgcgcccagaagttcaacggcctgaccgtgctgccccccctgctgaccgacgagatgatcgcccagtacaccagcgccctgctggccggcaccatcaccagcggctggaccttcggcgccggccccgccctgcagatccccttccccatgcagatggcctacaggttcaacggcatcggcgtgacccagaacgtgctgtacgagaaccagaagctgatcgccaaccagttcaacagcgccatcggcaagatccaggacagcctgagcagcacccccagcgccctgggcaagctgcaggacgtggtgaaccagaacgcccaggccctgaacaccctggtgaagcagctgagcagcaacttcggcgccatcagcagcgtgctgaacgacatcctgagcaggctggacccccccgaggccgaggtgcagatcgacaggctgatcaccggcaggctgcagagcctgcagacctacgtgacccagcagctgatcagggccgccgagatcagggccagcgccaacctggccgccaccaagatgagcgagtgcgtgctgggccagagcaagagggtggacttctgcggcaagggctaccacctgatgagcttcccccagagcgccccccacggcgtggtgttcctgcacgtgacctacgtgcccgcccaggagaagaacttcaccaccgcccccgccatctgccacgacggcaaggcccacttccccagggagggcgtgttcgtgagcaacggcacccactggttcgtgacccagaggaacttctacgagccccagatcatcaccaccgacaacaccttcgtgagcggcaactgcgacgtggtgatcggcatcgtgaacaacaccgtgtacgaccccctgcagcccgagctggacagcttcaaggaggagctggacaagtacttcaagaaccacaccagccccgacgtggacctgggcgacatcagcggcatcaacgccagcgtggtgaacatccagaaggagatcgacaggctgaacgaggtggccaagaacctgaacgagagcctgatcgacctgcaggagctgggcaagtacgagcagtacatcaagtggccctggtacatctggctgggcttcatcgccggcctgatcgccatcgtgatggtgaccatcatgctgtgctgcatgaccagctgctgcagctgcctgaagggctgctgcagctgcggcagctgctgcaagttcgacgaggacgacagcgagcccgtgctgaagggcgtgaagctgcactacaccggaagcggagccacgaacttctctctgttaaagcaagcaggagatgttgaagaaaaccccgggcctatgaaggcaatactagtagttctgctatatacatttgcaaccgcaaatgcagacacattatgtataggttatcatgcgaacaactcaacagacactgtagacacagtactagaaaagaatgtaacagtaacacactctgttaaccttctagaagacaagcataacgggaaactatgcaaactaagaggggtagccccattgcatttgggtaaatgtaacattgctggctggatcctgggaaatccagagtgtgaatcactctccacagcaagctcatggtcctacattgtggaaacatctagttcagacaatggaacgtgttacccaggagatttcatcgattatgaggagctaagagagcaattgagctcagtgtcatcatttgaaaggtttgagatattccccaagacaagttcatggcccaatcatgactcgaacaaaggtgtaacgacagcatgtcctcatgctggagcaaaaagcttctacaaaaatttaatatggctagttaaaaaaggaaattcatacccaaagctcagcaaatcctacattaatgataaagggaaagaagtcctcgtgctatggggcattcaccatccacctactagtgctgaccaacaaagtctctatcagaatgcagatgcatatgtttttgtggggacatcaagatacagcaagaagttcaagccggaaatagcaataaggcccaaagtgagggatcaagaagggagaatgaactattactggacactagtagagccgggagacaaaataacattcgaagcaactggaaatctagtggtaccgagatatgcattcgcaatggaaagaaatgctggatctggtattatcatttcagatacaccagtccacgattgcaatacaacttgtcagacacccaagggtgctataaacaccagcctcccatttcagaacatacatccgatcacaattggaaaatgtccaaaatatgtaaaaagcacaaaattgagactggccacaggattgaggaatgtcccgtccattcaatctagaggcctatttggggccattgccggtttcattgaaggggggtggacagggatggtagatggatggtacggttatcaccatcaaaatgagcaggggtcaggatatgcagccgacctgaagagcacacagaatgccattgacgagattactaacaaagtaaactctgttattgaaaaaatgaatacacagttcacagcagtaggtaaagagttcaaccacctggaaaaaagaatagagaatttaaataaaaaagttgatgatggtttcctggacatttggacttacaatgccgaactgttggttctattggaaaatgaaagaactttggactaccacgattcaaaggtgaagaacttatatgaaaaggtaagaagccagttaaaaaacaatgccaaggaaattggaaacggctgctttgaattttaccacaaatgtgataacacgtgcatggaaagtgtcaaaaatgggacttatgactacccaaaatactcagaggaagcaaaattaaacagagaagaaatagatggggtaaagctggaatcaacaaggatttaccagattttggcgatctattcaaccgtcgccagttcattggtactggtagtctccctgggggcaatcagtttctggatgtgctctaatgggtctctacagtgtagaatatgtatttaaggaagcggagccacgaacttctctctgttaaagcaagcaggagatgttgaagaaaaccccgggcctagcaaaagcaggggataattctattaaccatgaagactatcattgctttgagctacattctatgtctggttttcgctcaaaaacttcctggaaatgacaatagcactgcaacgctgtgccttgggcaccatgcagtaccaaacggaacgatagtgaaaacaatcacgaatgaccaaattgaagttactaatgctactgagctggttcagaattcctcaataggtgaaatatgcgacagtcctcatcagatccttgatggagaaaactgcacactaatagatgctctattgggagaccctcagtgtgatggctttcaaaataagaaatgggacctttttgttgaacgaagcaaagcctacagcaactgttacccttatgatgtgccggattatgcctcccttaggtcactagttgcctcatccggcacactggagtttaacaatgaaagcttcaattgggctggagtcactcaaaacggaacaagttctgcttgcataaggggatctaatagtagtttctttagtagattaaattggttgacccacttaaacttcaagtacccagcattgaacgtgactatgccaaacaatgaacaatttgacaaattgtacatttggggggttcaccacccgggtacggacaaggaccaaatcttcctgtatgctcaatcatcaggaagaatcacagtatctaccaaaagaagccaacaagctgtaatcccgaatatcggatctagacccagaataaggaatatccctagcagaataagcatctattggacaatagtaaaaccgggagacatacttttgattaacagcacagggaatctaattgctcctaggggttacttcaaaatacgaagtgggaaaagctcaataatgagatcagatgcacccattggcaaatgcaagtctgaatgcatcactccaaatggaagcattcccaatgacaaaccattccaaaatgtaaacaggatcacatacggggcctgtcccagatatgttaagcaaagcactctgaaattggcaacaggaatgcgaaatgtaccagagaaacaaactagaggcatatttggcgcaatagcgggtttcatagaaaatggttgggagggaatggtggatggttggtacggtttcaggcatcaaaattctgagggaagaggacaagcagcagatctcaaaagcactcaagcagcaatcgatcaaatcaatgggaagctgaatcgattgatcgggaaaaccaacgagaaattccatcagattgagaaagaattctcagaagtagaagggagaattcaggaccttgagaaatatgttgaggacacaaaaatagatctctggtcatacaacgcagagcttcttgttgccctggaaaaccaacatacaattgatctaactgactcagaaatgaacaaactgtttgaaaaaacaaagaagcaactgagggaaaatgctgaggatatgggcaatggttgtttcaaaatataccacaaatgtgacaatgcctgcataggatcaatcagaaatggaacttatgaccacgatgtatacagggatgaagcattaaacaaccggttccagatcaagggagttgagctgaagtcagggtacaaagattggatcctatggatttcctttgccatatcatgttttttgctttgtgttgctttgttggggttcatcatgtgggcctgccaaaagggcaacattaggtgcaacatttgcatttgagtgcattaattaaaaacacccttgtttctactggaagcggagccacgaacttctctctgttaaagcaagcaggagatgttgaagaaaaccccgggcctattttctaatatccacaaaatgaaggcaataattgtactactcatggtagtaacatccaatgcagatcgaatctgcactgggataacatcgtcaaactcaccacatgtcgtcaaaactgctactcaaggggaggtcaacgtgaccggtgtaataccactgacaacaacacccaccaaatctcattttgcaaatctcaaaggaacagaaaccagggggaaactatgcccaaaatgcctcaactgcacagatctggatgtagccttgggcagaccaaaatgcacagggaaaataccctctgcaagggtttcaatactccatgaagtcagacctgttacatctgggtgctttcctataatgcacgatagaacaaaaattagacagctgcctaaccttctccgaggatacgaacatgtcaggttatcaactcacaacgttatcaatgcaaaagatgcaccaggaagaccctacgaaattggaacctcagggtcttgccctaacattaccaatggaaacggattcttcgcaacaatggcttgggccgtcccaaaaaacaaaacagcaacaaatccattaacaatagaagtaccatacatttgtacagaaggagaagaccaaattaccgtttgggggttccactctgacaacgagacccaaatggcaaagctctatggggactcaaagccccagaagttcacctcatctgccaacggagtgaccacacattacgtttcacagattggtggcttcccaaatcaaacagaagacggaggactaccacaaagtggcagaattgttgttgattacatggtgcagaaatctggaaaaacaggaacaattacctatcaaagaggtattttattgcctcaaaaagtgtggtgcgcaagtggcaggagcaaggtaataaaaggatccttgcccttaattggagaagcagattgcctccatgaaaaatacggtggattaaacaaaagcaagccttactacacaggggaacatgcaaaggccataggaaattgcccaatatgggtgaaaacacccttgaagctggccaatggaaccaaatatagaccccctgcaaaactattaaaggaaagaggtttcttcggagccattgctggtttcttagagggaggatgggaaggaatgattgcaggttggcacggatacacatcccatggggcacatggagtagcggtggcagctgaccttaagagcactcaagaggccataaacaagataacaaaaaatctcaactctttgagtgagctggaagtaaagaatcttcaaagactaagcggtgccatggatgaactccacaacgaaatactagaactagatgagaaagtggatgatctcagagctgacacaataagctcacaaatagaactcgcagtcctgctttccaatgaaggaataataaacagtgaagatgaacatctcttggcgcttgaaagaaagctgaagaaaatgctgggcccctctgctgtagagatagggaatggatgctttgaaaccaaacacaagtgcaaccagacctgcctcgacagaatagctgctggtacctttgatgcaggagaattttctctccccacctttgattcactgaatattactgctgcatctttaaatgacgacggattggacaatcatactatactgctttactactcaactgctgcctccagtttggctgtaacactgatgatagctatctttgttgtttatatggtctccagagacaatgtttcttgctccatttgtctataaggaaagttaagccctgtattttcctttattgtagtgcttgtttgcttgttgtcattacaaagaaacgttattgaaaaattgatgactcgagctggtactgcatgcacgcaatgctagctgcccctttcccgtcctgggtaccccgagtctcccccgacctcgggtcccaggtatgctcccacctccacctgccccactcaccacctctgctagttccagacacctcccaagcacgcagcaatgcagctcaaaacgcttagcctagccacacccccacgggaaacagcagtgattaacctttagcaataaacgaaagtttaactaagctatactaaccccagggttggtcaatttcgtgccagccacaccctggagctagcaaaaaaaa

SEQ ID NO: 410 - DNA, 11423 bp, synthetic construct
  source 1..11423: mol_type = other DNA; note = Hybrid Vaccine Candidate 22
ctcgacattgattattgactagttattaatagtaatcaattacggggtcattagttcatagcccatatatggagttccgcgttacataacttacggtaaatggcccgcctggctgaccgcccaacgacccccgcccattgacgtcaataatgacgtatgttcccatagtaacgccaatagggactttccattgacgtcaatgggtggagtatttacggtaaactgcccacttggcagtacatcaagtgtatcatatgccaagtacgccccctattgacgtcaatgacggtaaatggcccgcctggcattatgcccagtacatgaccttatgggactttcctacttggcagtacatctacgtattagtcatcgctattaccatggtcgaggtgagccccacgttctgcttcactctccccatctcccccccctccccacccccaattttgtatttatttattttttaattattttgtgcagcgatgggggcggggggggggggggggcgcgcgccaggcggggcggggcggggcgaggggcggggcggggcgaggcggagaggtgcggcggcagccaatcagagcggcgcgctccgaaagtttccttttatggcgaggcggcggcggcggcggccctataaaaagcgaagcgcgcggcgggcgggagtcgctgcgcgctgccttcgccccgtgccccgctccgccgccgcctcgcgccgcccgccccggctctgactgaccgcgttactcccacaggtgagcgggcgggacggcccttctcctccgggctgtaattagcgcttggtttaatgacggcttgtttcttttctgtggctgcgtgaaagccttgaggggctccgggagggccctttgtgcggggggagcggctcggggggtgcgtgcgtgtgtgtgtgcgtggggagcgccgcgtgcggctccgcgctgcccggcggctgtgagcgctgcgggcgcggcgcggggctttgtgcgctccgcagtgtgcgcgaggggagcgcggccgggggcggtgccccgcggtgcggggggggctgcgaggggaacaaaggctgcgtgcggggtgtgtgcgtgggggggtgagcagggggtgtgggcgcgtcggtcgggctgcaaccccccctgcacccccctccccgagttgctgagcacggcccggcttcgggtgcggggctccgtacggggcgtggcgcggggctcgccgtgccgggcggggggtggcggcaggtgggggtgccgggcggggcggggccgcctcgggccggggagggctcgggggaggggcgcggcggcccccggagcgccggcggctgtcgaggcgcggcgagccgcagccattgccttttatggtaatcgtgcgagagggcgcagggacttcctttgtcccaaatctgtgcggagccgaaatctgggaggcgccgccgcaccccctctagcgggcgcggggcgaagcggtgcggcgccggcaggaaggaaatgggcggggagggccttcgtgcgtcgccgcgccgccgtccccttctccctctccagcctcggggctgtccgcggggggacggctgccttcgggggggacggggcagggcggggttcggcttctggcgtgtgaccggcggctctagagcctctgctaaccatgttcatgccttcttctttttcctacagctcctgggcaacgtgctggttattgtgctgtctcatcattttggcaaagaattggagaataaactagtattcttctggtccccacagactcagagagaacccgccaccatgttcgtgttcctggtgctgctgcccctggtgagcagccagtgcgtgaacctgaccaccaggacccagctgccccccgcctacaccaacagcttcaccaggggcgtgtactaccccgacaaggtgttcaggagcagcgtgctgcacagcacccaggacctgttcctgcccttcttcagcaacgtgacctggttccacgccatccacgtgagcggcaccaacggcaccaagaggttcgacaaccccgtgctgcccttcaacgacggcgtgtacttcgccagcaccgagaagagcaacatcatcaggggctggatcttcggcaccaccctggacagcaagacccagagcctgctgatcgtgaacaacgccaccaacgtggtgatcaaggtgtgcgagttccagttctgcaacgaccccttcctgggcgtgtactaccacaagaacaacaagagctggatggagagcgagttcagggtgtacagcagcgccaacaactgcaccttcgagtacgtgagccagcccttcctgatggacctggagggcaagcagggcaacttcaagaacctgagggagttcgtgttcaagaacatcgacggctacttcaagatctacagcaagcacacccccatcaacctggtgagggacctgccccagggcttcagcgccctggagcccctggtggacctgcccatcggcatcaacatcaccaggttccagaccctgctggccctgcacaggagctacctgacccccggcgacagcagcagcggctggaccgccggcgccgccgcctactacgtgggctacctgcagcccaggaccttcctgctgaagtacaacgagaacggcaccatcaccgacgccgtggactgcgccctggaccccctgagcgagaccaagtgcaccctgaagagcttcaccgtggagaagggcatctaccagaccagcaacttcagggtgcagcccaccgagagcatcgtgaggttccccaacatcaccaacctgtgccccttcggcgaggtgttcaacgccaccaggttcgccagcgtgtacgcctggaacaggaagaggatcagcaactgcgtggccgactacagcgtgctgtacaacagcgccagcttcagcaccttcaagtgctacggcgtgagccccaccaagctgaacgacctgtgcttcaccaacgtgtacgccgacagcttcgtgatcaggggcgacgaggtgaggcagatcgcccccggccagaccggcaagatcgccgactacaactacaagctgcccgacgacttcaccggctgcgtgatcgcctggaacagcaacaacctggacagcaaggtgggcggcaactacaactacctgtacaggctgttcaggaagagcaacctgaagcccttcgagagggacatcagcaccgagatctaccaggccggcagcaccccctgcaacggcgtggagggcttcaactgctacttccccctgcagagctacggcttccagcccaccaacggcgtgggctaccagccctacagggtggtggtgctgagcttcgagctgctgcacgcccccgccaccgtgtgcggccccaagaagagcaccaacctggtgaagaacaagtgcgtgaacttcaacttcaacggcctgaccggcaccggcgtgctgaccgagagcaacaagaagttcctgcccttccagcagttcggcagggacatcgccgacaccaccgacgccgtgagggacccccagaccctggagatcctggacatcaccccctgcagcttcggcggcgtgagcgtgatcacccccggcaccaacaccagcaaccaggtggccgtgctgtaccaggacgtgaactgcaccgaggtgcccgtggccatccacgccgaccagctgacccccacctggagggtgtacagcaccggcagcaacgtgttccagaccagggccggctgcctgatcggcgccgagcacgtgaacaacagctacgagtgcgacatccccatcggcgccggcatctgcgccagctaccagacccagaccaacagccccaggagggccaggagcgtggccagccagagcatcatcgcctacaccatgagcctgggcgccgagaacagcgtggcctacagcaacaacagcatcgccatccccaccaacttcaccatcagcgtgaccaccgagatcctgcccgtgagcatgaccaagaccagcgtggactgcaccatgtacatctgcggcgacagcaccgagtgcagcaacctgctgctgcagtacggcagcttctgcacccagctgaacagggccctgaccggcatcgccgtggagcaggacaagaacacccaggaggtgttcgcccaggtgaagcagatctacaagaccccccccatcaaggacttcggcggcttcaacttcagccagatcctgcccgaccccagcaagcccagcaagaggagcttcatcgaggacctgctgttcaacaaggtgaccctggccgacgccggcttcatcaagcagtacggcgactgcctgggcgacatcgccgccagggacctgatctgcgcccagaagttcaacggcctgaccgtgctgccccccctgctgaccgacgagatgatcgcccagtacaccagcgccctgctggccggcaccatcaccagcggctggaccttcggcgccggcgccgccctgcagatccccttcgccatgcagatggcctacaggttcaacggcatcggcgtgacccagaacgtgctgtacgagaaccagaagctgatcgccaaccagttcaacagcgccatcggcaagatccaggacagcctgagcagcaccgccagcgccctgggcaagctgcaggacgtggtgaaccagaacgcccaggccctgaacaccctggtgaagcagctgagcagcaacttcggcgccatcagcagcgtgctgaacgacatcctgagcaggctggacccccccgaggccgaggtgcagatcgacaggctgatcaccggcaggctgcagagcctgcagacctacgtgacccagcagctgatcagggccgccgagatcagggccagcgccaacctggccgccaccaagatgagcgagtgcgtgctgggccagagcaagagggtggacttctgcggcaagggctaccacctgatgagcttcccccagagcgccccccacggcgtggtgttcctgcacgtgacctacgtgcccgcccaggagaagaacttcaccaccgcccccgccatctgccacgacggcaaggcccacttccccagggagggcgtgttcgtgagcaacggcacccactggttcgtgacccagaggaacttctacgagccccagatcatcaccaccgacaacaccttcgtgagcggcaactgcgacgtggtgatcggcatcgtgaacaacaccgtgtacgaccccctgcagcccgagctggacagcttcaaggaggagctggacaagtacttcaagaaccacaccagccccgacgtggacctgggcgacatcagcggcatcaacgccagcgtggtgaacatccagaaggagatcgacaggctgaacgaggtggccaagaacctgaacgagagcctgatcgacctgcaggagctgggcaagtacgagcagtacatcaagtggccctggtacatctggctgggcttcatcgccggcctgatcgccatcgtgatggtgaccatcatgctgtgctgcatgaccagctgctgcagctgcctgaagggctgctgcagctgcggcagctgctgcaagttcgacgaggacgacagcgagcccgtgctgaagggcgtgaagctgcactacaccggaagcggagccacgaacttctctctgttaaagcaagcaggagatgttgaagaaaaccccgggcctatgaaggcaatactagtagttctgctatatacatttgcaaccgcaaatgcagacacattatgtataggttatcatgcgaacaactcaacagacactgtagacacagtactagaaaagaatgtaacagtaacacactctgttaaccttctagaagacaagcataacgggaaactatgcaaactaagaggggtagccccattgcatttgggtaaatgtaacattgctggctggatcctgggaaatccagagtgtgaatcactctccacagcaagctcatggtcctacattgtggaaacatctagttcagacaatggaacgtgttacccaggagatttcatcgattatgaggagctaagagagcaattgagctcagtgtcatcatttgaaaggtttgagatattccccaagacaagttcatggcccaatcatgactcgaacaaaggtgtaacgacagcatgtcctcatgctggagcaaaaagcttctacaaaaatttaatatggctagttaaaaaaggaaattcatacccaaagctcagcaaatcctacattaatgataaagggaaagaagtcctcgtgctatggggcattcaccatccacctactagtgctgaccaacaaagtctctatcagaatgcagatgcatatgtttttgtggggacatcaagatacagcaagaagttcaagccggaaatagcaataaggcccaaagtgagggatcaagaagggagaatgaactattactggacactagtagagccgggagacaaaataacattcgaagcaactggaaatctagtggtaccgagatatgcattcgcaatggaaagaaatgctggatctggtattatcatttcagatacaccagtccacgattgcaatacaacttgtcagacacccaagggtgctataaacaccagcctcccatttcagaacatacatccgatcacaattggaaaatgtccaaaatatgtaaaaagcacaaaattgagactggccacaggattgaggaatgtcccgtccattcaatctagaggcctatttggggccattgccggtttcattgaaggggggtggacagggatggtagatggatggtacggttatcaccatcaaaatgagcaggggtcaggatatgcagccgacctgaagagcacacagaatgccattgacgagattactaacaaagtaaactctgttattgaaaaaatgaatacacagttcacagcagtaggtaaagagttcaaccacctggaaaaaagaatagagaatttaaataaaaaagttgatgatggtttcctggacatttggacttacaatgccgaactgttggttctattggaaaatgaaagaactttggactaccacgattcaaaggtgaagaacttatatgaaaaggtaagaagccagttaaaaaacaatgccaaggaaattggaaacggctgctttgaattttaccacaaatgtgataacacgtgcatggaaagtgtcaaaaatgggacttatgactacccaaaatactcagaggaagcaaaattaaacagagaagaaatagatggggtaaagctggaatcaacaaggatttaccagattttggcgatctattcaaccgtcgccagttcattggtactggtagtctccctgggggcaatcagtttctggatgtgctctaatgggtctctacagtgtagaatatgtatttaaggaagcggagccacgaacttctctctgttaaagcaagcaggagatgttgaagaaaaccccgggcctagcaaaagcaggggataattctattaaccatgaagactatcattgctttgagctacattctatgtctggttttcgctcaaaaacttcctggaaatgacaatagcactgcaacgctgtgccttgggcaccatgcagtaccaaacggaacgatagtgaaaacaatcacgaatgaccaaattgaagttactaatgctactgagctggttcagaattcctcaataggtgaaatatgcgacagtcctcatcagatccttgatggagaaaactgcacactaatagatgctctattgggagaccctcagtgtgatggctttcaaaataagaaatgggacctttttgttgaacgaagcaaagcctacagcaactgttacccttatgatgtgccggattatgcctcccttaggtcactagttgcctcatccggcacactggagtttaacaatgaaagcttcaattgggctggagtcactcaaaacggaacaagttctgcttgcataaggggatctaatagtagtttctttagtagattaaattggttgacccacttaaacttcaagtacccagcattgaacgtgactatgccaaacaatgaacaatttgacaaattgtacatttggggggttcaccacccgggtacggacaaggaccaaatcttcctgtatgctcaatcatcaggaagaatcacagtatctaccaaaagaagccaacaagctgtaatcccgaatatcggatctagacccagaataaggaatatccctagcagaataagcatctattggacaatagtaaaaccgggagacatacttttgattaacagcacagggaatctaattgctcctaggggttacttcaaaatacgaagtgggaaaagctcaataatgagatcagatgcacccattggcaaatgcaagtctgaatgcatcactccaaatggaagcattcccaatgacaaaccattccaaaatgtaaacaggatcacatacggggcctgtcccagatatgttaagcaaagcactctgaaattggcaacaggaatgcgaaatgtaccagagaaacaaactagaggcatatttggcgcaatagcgggtttcatagaaaatggttgggagggaatggtggatggttggtacggtttcaggcatcaaaattctgagggaagaggacaagcagcagatctcaaaagcactcaagcagcaatcgatcaaatcaatgggaagctgaatcgattgatcgggaaaaccaacgagaaattccatcagattgagaaagaattctcagaagtagaagggagaattcaggaccttgagaaatatgttgaggacacaaaaatagatctctggtcatacaacgcagagcttcttgttgccctggaaaaccaacatacaattgatctaactgactcagaaatgaacaaactgtttgaaaaaacaaagaagcaactgagggaaaatgctgaggatatgggcaatggttgtttcaaaatataccacaaatgtgacaatgcctgcataggatcaatcagaaatggaacttatgaccacgatgtatacagggatgaagcattaaacaaccggttccagatcaagggagttgagctgaagtcagggtacaaagattggatcctatggatttcctttgccatatcatgttttttgctttgtgttgctttgttggggttcatcatgtgggcctgccaaaagggcaacattaggtgcaacatttgcatttgagtgcattaattaaaaacacccttgtttctactggaagcggagccacgaacttctctctgttaaagcaagcaggagatgttgaagaaaaccccgggcctattttctaatatccacaaaatgaaggcaataattgtactactcatggtagtaacatccaatgcagatcgaatctgcactgggataacatcgtcaaactcaccacatgtcgtcaaaactgctactcaaggggaggtcaacgtgaccggtgtaataccactgacaacaacacccaccaaatctcattttgcaaatctcaaaggaacagaaaccagggggaaactatgcccaaaatgcctcaactgcacagatctggatgtagccttgggcagaccaaaatgcacagggaaaataccctctgcaagggtttcaatactccatgaagtcagacctgttacatctgggtgctttcctataatgcacgatagaacaaaaattagacagctgcctaaccttctccgaggatacgaacatgtcaggttatcaactcacaacgttatcaatgcaaaagatgcaccaggaagaccctacgaaattggaacctcagggtcttgccctaacattaccaatggaaacggattcttcgcaacaatggcttgggccgtcccaaaaaacaaaacagcaacaaatccattaacaatagaagtaccatacatttgtacagaaggagaagaccaaattaccgtttgggggttccactctgacaacgagacccaaatggcaaagctctatggggactcaaagccccagaagttcacctcatctgccaacggagtgaccacacattacgtttcacagattggtggcttcccaaatcaaacagaagacggaggactaccacaaagtggcagaattgttgttgattacatggtgcagaaatctggaaaaacaggaacaattacctatcaaagaggtattttattgcctcaaaaagtgtggtgcgcaagtggcaggagcaaggtaataaaaggatccttgcccttaattggagaagcagattgcctccatgaaaaatacggtggattaaacaaaagcaagccttactacacaggggaacatgcaaaggccataggaaattgcccaatatgggtgaaaacacccttgaagctggccaatggaaccaaatatagaccccctgcaaaactattaaaggaaagaggtttcttcggagccattgctggtttcttagagggaggatgggaaggaatgattgcaggttggcacggatacacatcccatggggcacatggagtagcggtggcagctgaccttaagagcactcaagaggccataaacaagataacaaaaaatctcaactctttgagtgagctggaagtaaagaatcttcaaagactaagcggtgccatggatgaactccacaacgaaatactagaactagatgagaaagtggatgatctcagagctgacacaataagctcacaaatagaactcgcagtcctgctttccaatgaaggaataataaacagtgaagatgaacatctcttggcgcttgaaagaaagctgaagaaaatgctgggcccctctgctgtagagatagggaatggatgctttgaaaccaaacacaagtgcaaccagacctgcctcgacagaatagctgctggtacctttgatgcaggagaattttctctccccacctttgattcactgaatattactgctgcatctttaaatgacgacggattggacaatcatactatactgctttactactcaactgctgcctccagtttggctgtaacactgatgatagctatctttgttgtttatatggtctccagagacaatgtttcttgctccatttgtctataaggaaagttaagccctgtattttcctttattgtagtgcttgtttgcttgttgtcattacaaagaaacgttattgaaaaattgatgactcgagctggtactgcatgcacgcaatgctagctgcccctttcccgtcctgggtaccccgagtctcccccgacctcgggtcccaggtatgctcccacctccacctgccccactcaccacctctgctagttccagacacctcccaagcacgcagcaatgcagctcaaaacgcttagcctagccacacccccacgggaaacagcagtgattaacctttagcaataaacgaaagtttaactaagctatactaaccccagggttggtcaatttcgtgccagccacaccctggagctagcaaaaaaaa

SEQ ID NO: 411 - DNA, 9509 bp, synthetic construct
  source 1..9509: mol_type = other DNA; note = Hybrid Vaccine Candidate 23
atgttcgtgttcctggtgctgctgcccctggtgagcagccagtgcgtgaacctgatcaccaggacccagagctacaccaacagcttcaccaggggcgtgtactaccccgacaaggtgttcaggagcagcgtgctgcacagcacccaggacctgttcctgcccttcttcagcaacgtgacctggttccacgccatccacgtgagcggcaccaacggcaccaagaggttcgacaaccccgtgctgcccttcaacgacggcgtgtacttcgccagcaccgagaagagcaacatcatcaggggctggatcttcggcaccaccctggacagcaagacccagagcctgctgatcgtgaacaacgccaccaacgtggtgatcaaggtgtgcgagttccagttctgcaacgaccccttcctggacgtgtactaccacaagaacaacaagagctggatggagagcgagttcagggtgtacagcagcgccaacaactgcaccttcgagtacgtgagccagcccttcctgatggacctggagggcaagcagggcaacttcaagaacctgagggagttcgtgttcaagaacatcgacggctacttcaagatctacagcaagcacacccccatcaacctgggcagggacctgccccagggcttcagcgccctggagcccctggtggacctgcccatcggcatcaacatcaccaggttccagaccctgctggccctgcacaggagctacctgacccccggcgacagcagcagcggctggaccgccggcgccgccgcctactacgtgggctacctgcagcccaggaccttcctgctgaagtacaacgagaacggcaccatcaccgacgccgtggactgcgccctggaccccctgagcgagaccaagtgcaccctgaagagcttcaccgtggagaagggcatctaccagaccagcaacttcagggtgcagcccaccgagagcatcgtgaggttccccaacatcaccaacctgtgccccttcgacgaggtgttcaacgccaccaggttcgccagcgtgtacgcctggaacaggaagaggatcagcaactgcgtggccgactacagcgtgctgtacaacttcgcccccttcttcgccttcaagtgctacggcgtgagccccaccaagctgaacgacctgtgcttcaccaacgtgtacgccgacagcttcgtgatcaggggcaacgaggtgagccagatcgcccccggccagaccggcaacatcgccgactacaactacaagctgcccgacgacttcaccggctgcgtgatcgcctggaacagcaacaagctggacagcaaggtgggcggcaactacaactacctgtacaggctgttcaggaagagcaacctgaagcccttcgagagggacatcagcaccgagatctaccaggccggcaacaagccctgcaacggcgtggccggcttcaactgctacttccccctgaggagctacggcttcaggcccacctacggcgtgggccaccagccctacagggtggtggtgctgagcttcgagctgctgcacgcccccgccaccgtgtgcggccccaagaagagcaccaacctggtgaagaacaagtgcgtgaacttcaacttcaacggcctgaccggcaccggcgtgctgaccgagagcaacaagaagttcctgcccttccagcagttcggcagggacatcgccgacaccaccgacgccgtgagggacccccagaccctggagatcctggacatcaccccctgcagcttcggcggcgtgagcgtgatcacccccggcaccaacaccagcaaccaggtggccgtgctgtaccagggcgtgaactgcaccgaggtgcccgtggccatccacgccgaccagctgacccccacctggagggtgtacagcaccggcagcaacgtgttccagaccagggccggctgcctgatcggcgccgagtacgtgaacaacagctacgagtgcgacatccccatcggcgccggcatctgcgccagctaccagacccagaccaagagccaccagcaggcccagagcgtggccagccagagcatcatcgcctacaccatgagcctgggcgccgagaacagcgtggcctacagcaacaacagcatcgccatccccaccaacttcaccatcagcgtgaccaccgagatcctgcccgtgagcatgaccaagaccagcgtggactgcaccatgtacatctgcggcgacagcaccgagtgcagcaacctgctgctgcagtacggcagcttctgcacccagctgaagagggccctgaccggcatcgccgtggagcaggacaagaacacccaggaggtgttcgcccaggtgaagcagatctacaagaccccccccatcaagtacttcggcggcttcaacttcagccagatcctgcccgaccccagcaagcccagcaagaggagccccatcgaggacctgctgttcaacaaggtgaccctggccgacgccggcttcatcaagcagtacggcgactgcctgggcgacatcgccgccagggacctgatctgcgcccagaagttcaacggcctgaccgtgctgccccccctgctgaccgacgagatgatcgcccagtacaccagcgccctgctggccggcaccatcaccagcggctggaccttcggcgccggccccgccctgcagatccccttccccatgcagatggcctacaggttcaacggcatcggcgtgacccagaacgtgctgtacgagaaccagaagctgatcgccaaccagttcaacagcgccatcggcaagatccaggacagcctgagcagcacccccagcgccctgggcaagctgcaggacgtggtgaaccacaacgcccaggccctgaacaccctggtgaagcagctgagcagcaagttcggcgccatcagcagcgtgctgaacgacatcctgagcaggctggacccccccgaggccgaggtgcagatcgacaggctgatcaccggcaggctgcagagcctgcagacctacgtgacccagcagctgatcagggccgccgagatcagggccagcgccaacctggccgccaccaagatgagcgagtgcgtgctgggccagagcaagagggtggacttctgcggcaagggctaccacctgatgagcttcccccagagcgccccccacggcgtggtgttcctgcacgtgacctacgtgcccgcccaggagaagaacttcaccaccgcccccgccatctgccacgacggcaaggcccacttccccagggagggcgtgttcgtgagcaacggcacccactggttcgtgacccagaggaacttctacgagccccagatcatcaccaccgacaacaccttcgtgagcggcaactgcgacgtggtgatcggcatcgtgaacaacaccgtgtacgaccccctgcagcccgagctggacagcttcaaggaggagctggacaagtacttcaagaaccacaccagccccgacgtggacctgggcgacatcagcggcatcaacgccagcgtggtgaacatccagaaggagatcgacaggctgaacgaggtggccaagaacctgaacgagagcctgatcgacctgcaggagctgggcaagtacgagcagtacatcaagtggccctggtacatctggctgggcttcatcgccggcctgatcgccatcgtgatggtgaccatcatgctgtgctgcatgaccagctgctgcagctgcctgaagggctgctgcagctgcggcagctgctgcaagttcgacgaggacgacagcgagcccgtgctgaagggcgtgaagctgcactacaccggaagcggagccacgaacttctctctgttaaagcaagcaggagatgttgaagaaaaccccgggcctatgaaggcaatactagtagttctgctatatacatttgcaaccgcaaatgcagacacattatgtataggttatcatgcgaacaactcaacagacactgtagacacagtactagaaaagaatgtaacagtaacacactctgttaaccttctagaagacaagcataacgggaaactatgcaaactaagaggggtagccccattgcatttgggtaaatgtaacattgctggctggatcctgggaaatccagagtgtgaatcactctccacagcaagctcatggtcctacattgtggaaacatctagttcagacaatggaacgtgttacccaggagatttcatcgattatgaggagctaagagagcaattgagctcagtgtcatcatttgaaaggtttgagatattccccaagacaagttcatggcccaatcatgactcgaacaaaggtgtaacgacagcatgtcctcatgctggagcaaaaagcttctacaaaaatttaatatggctagttaaaaaaggaaattcatacccaaagctcagcaaatcctacattaatgataaagggaaagaagtcctcgtgctatggggcattcaccatccacctactagtgctgaccaacaaagtctctatcagaatgcagatgcatatgtttttgtggggacatcaagatacagcaagaagttcaagccggaaatagcaataaggcccaaagtgagggatcaagaagggagaatgaactattactggacactagtagagccgggagacaaaataacattcgaagcaactggaaatctagtggtaccgagatatgcattcgcaatggaaagaaatgctggatctggtattatcatttcagatacaccagtccacgattgcaatacaacttgtcagacacccaagggtgctataaacaccagcctcccatttcagaacatacatccgatcacaattggaaaatgtccaaaatatgtaaaaagcacaaaattgagactggccacaggattgaggaatgtcccgtccattcaatctagaggcctatttggggccattgccggtttcattgaaggggggtggacagggatggtagatggatggtacggttatcaccatcaaaatgagcaggggtcaggatatgcagccgacctgaagagcacacagaatgccattgacgagattactaacaaagtaaactctgttattgaaaaaatgaatacacagttcacagcagtaggtaaagagttcaaccacctggaaaaaagaatagagaatttaaataaaaaagttgatgatggtttcctggacatttggacttacaatgccgaactgttggttctattggaaaatgaaagaactttggactaccacgattcaaaggtgaagaacttatatgaaaaggtaagaagccagttaaaaaacaatgccaaggaaattggaaacggctgctttgaattttaccacaaatgtgataacacgtgcatggaaagtgtcaaaaatgggacttatgactacccaaaatactcagaggaagcaaaattaaacagagaagaaatagatggggtaaagctggaatcaacaaggatttaccagattttggcgatctattcaaccgtcgccagttcattggtactggtagtctccctgggggcaatcagtttctggatgtgctctaatgggtctctacagtgtagaatatgtatttaaggaagcggagccacgaacttctctctgttaaagcaagcaggagatgttgaagaaaaccccgggcctagcaaaagcaggggataattctattaaccatgaagactatcattgctttgagctacattctatgtctggttttcgctcaaaaacttcctggaaatgacaatagcactgcaacgctgtgccttgggcaccatgcagtaccaaacggaacgatagtgaaaacaatcacgaatgaccaaattgaagttactaatgctactgagctggttcagaattcctcaataggtgaaatatgcgacagtcctcatcagatccttgatggagaaaactgcacactaatagatgctctattgggagaccctcagtgtgatggctttcaaaataagaaatgggacctttttgttgaacgaagcaaagcctacagcaactgttacccttatgatgtgccggattatgcctcccttaggtcactagttgcctcatccggcacactggagtttaacaatgaaagcttcaattgggctggagtcactcaaaacggaacaagttctgcttgcataaggggatctaatagtagtttctttagtagattaaattggttgacccacttaaacttcaagtacccagcattgaacgtgactatgccaaacaatgaacaatttgacaaattgtacatttggggggttcaccacccgggtacggacaaggaccaaatcttcctgtatgctcaatcatcaggaagaatcacagtatctaccaaaagaagccaacaagctgtaatcccgaatatcggatctagacccagaataaggaatatccctagcagaataagcatctattggacaatagtaaaaccgggagacatacttttgattaacagcacagggaatctaattgctcctaggggttacttcaaaatacgaagtgggaaaagctcaataatgagatcagatgcacccattggcaaatgcaagtctgaatgcatcactccaaatggaagcattcccaatgacaaaccattccaaaatgtaaacaggatcacatacggggcctgtcccagatatgttaagcaaagcactctgaaattggcaacaggaatgcgaaatgtaccagagaaacaaactagaggcatatttggcgcaatagcgggtttcatagaaaatggttgggagggaatggtggatggttggtacggtttcaggcatcaaaattctgagggaagaggacaagcagcagatctcaaaagcactcaagcagcaatcgatcaaatcaatgggaagctgaatcgattgatcgggaaaaccaacgagaaattccatcagattgagaaagaattctcagaagtagaagggagaattcaggaccttgagaaatatgttgaggacacaaaaatagatctctggtcatacaacgcagagcttcttgttgccctggaaaaccaacatacaattgatctaactgactcagaaatgaacaaactgtttgaaaaaacaaagaagcaactgagggaaaatgctgaggatatgggcaatggttgtttcaaaatataccacaaatgtgacaatgcctgcataggatcaatcagaaatggaacttatgaccacgatgtatacagggatgaagcattaaacaaccggttccagatcaagggagttgagctgaagtcagggtacaaagattggatcctatggatttcctttgccatatcatgttttttgctttgtgttgctttgttggggttcatcatgtgggcctgccaaaagggcaacattaggtgcaacatttgcatttgagtgcattaattaaaaacacccttgtttctactggaagcggagccacgaacttctctctgttaaagcaagcaggagatgttgaagaaaaccccgggcctattttctaatatccacaaaatgaaggcaataattgtactactcatggtagtaacatccaatgcagatcgaatctgcactgggataacatcgtcaaactcaccacatgtcgtcaaaactgctactcaaggggaggtcaacgtgaccggtgtaataccactgacaacaacacccaccaaatctcattttgcaaatctcaaaggaacagaaaccagggggaaactatgcccaaaatgcctcaactgcacagatctggatgtagccttgggcagaccaaaatgcacagggaaaataccctctgcaagggtttcaatactccatgaagtcagacctgttacatctgggtgctttcctataatgcacgatagaacaaaaattagacagctgcctaaccttctccgaggatacgaacatgtcaggttatcaactcacaacgttatcaatgcaaaagatgcaccaggaagaccctacgaaattggaacctcagggtcttgccctaacattaccaatggaaacggattcttcgcaacaatggcttgggccgtcccaaaaaacaaaacagcaacaaatccattaacaatagaagtaccatacatttgtacagaaggagaagaccaaattaccgtttgggggttccactctgacaacgagacccaaatggcaaagctctatggggactcaaagccccagaagttcacctcatctgccaacggagtgaccacacattacgtttcacagattggtggcttcccaaatcaaacagaagacggaggactaccacaaagtggcagaattgttgttgattacatggtgcagaaatctggaaaaacaggaacaattacctatcaaagaggtattttattgcctcaaaaagtgtggtgcgcaagtggcaggagcaaggtaataaaaggatccttgcccttaattggagaagcagattgcctccatgaaaaatacggtggattaaacaaaagcaagccttactacacaggggaacatgcaaaggccataggaaattgcccaatatgggtgaaaacacccttgaagctggccaatggaaccaaatatagaccccctgcaaaactattaaaggaaagaggtttcttcggagccattgctggtttcttagagggaggatgggaaggaatgattgcaggttggcacggatacacatcccatggggcacatggagtagcggtggcagctgaccttaagagcactcaagaggccataaacaagataacaaaaaatctcaactctttgagtgagctggaagtaaagaatcttcaaagactaagcggtgccatggatgaactccacaacgaaatactagaactagatgagaaagtggatgatctcagagctgacacaataagctcacaaatagaactcgcagtcctgctttccaatgaaggaataataaacagtgaagatgaacatctcttggcgcttgaaagaaagctgaagaaaatgctgggcccctctgctgtagagatagggaatggatgctttgaaaccaaacacaagtgcaaccagacctgcctcgacagaatagctgctggtacctttgatgcaggagaattttctctccccacctttgattcactgaatattactgctgcatctttaaatgacgacggattggacaatcatactatactgctttactactcaactgctgcctccagtttggctgtaacactgatgatagctatctttgttgtttatatggtctccagagacaatgtttcttgctccatttgtctataaggaaagttaagccctgtattttcctttattgtagtgcttgtttgcttgttgtcattacaaagaaacgttattgaaaaatggaagcggagccacgaacttctctctgttaaagcaagcaggagatgttgaagaaaaccccgggcctttcggagctattgctggtttcttggaaggaggatgggaaggaatgattgcaggttggcacggatacacatctcatggagcacatggagtagcagtggcagcagaccttaagagtacccatgatga

SEQ ID NO: 412 - DNA, 9509 bp, synthetic construct
  source 1..9509: mol_type = other DNA; note = Hybrid Vaccine Candidate 24
atgttcgtgttcctggtgctgctgcccctggtgagcagccagtgcgtgaacctgatcaccaggacccagagctacaccaacagcttcaccaggggcgtgtactaccccgacaaggtgttcaggagcagcgtgctgcacagcacccaggacctgttcctgcccttcttcagcaacgtgacctggttccacgccatccacgtgagcggcaccaacggcaccaagaggttcgacaaccccgtgctgcccttcaacgacggcgtgtacttcgccagcaccgagaagagcaacatcatcaggggctggatcttcggcaccaccctggacagcaagacccagagcctgctgatcgtgaacaacgccaccaacgtggtgatcaaggtgtgcgagttccagttctgcaacgaccccttcctggacgtgtactaccacaagaacaacaagagctggatggagagcgagttcagggtgtacagcagcgccaacaactgcaccttcgagtacgtgagccagcccttcctgatggacctggagggcaagcagggcaacttcaagaacctgagggagttcgtgttcaagaacatcgacggctacttcaagatctacagcaagcacacccccatcaacctgggcagggacctgccccagggcttcagcgccctggagcccctggtggacctgcccatcggcatcaacatcaccaggttccagaccctgctggccctgcacaggagctacctgacccccggcgacagcagcagcggctggaccgccggcgccgccgcctactacgtgggctacctgcagcccaggaccttcctgctgaagtacaacgagaacggcaccatcaccgacgccgtggactgcgccctggaccccctgagcgagaccaagtgcaccctgaagagcttcaccgtggagaagggcatctaccagaccagcaacttcagggtgcagcccaccgagagcatcgtgaggttccccaacatcaccaacctgtgccccttcgacgaggtgttcaacgccaccaggttcgccagcgtgtacgcctggaacaggaagaggatcagcaactgcgtggccgactacagcgtgctgtacaacttcgcccccttcttcgccttcaagtgctacggcgtgagccccaccaagctgaacgacctgtgcttcaccaacgtgtacgccgacagcttcgtgatcaggggcaacgaggtgagccagatcgcccccggccagaccggcaacatcgccgactacaactacaagctgcccgacgacttcaccggctgcgtgatcgcctggaacagcaacaagctggacagcaaggtgggcggcaactacaactacctgtacaggctgttcaggaagagcaacctgaagcccttcgagagggacatcagcaccgagatctaccaggccggcaacaagccctgcaacggcgtggccggcttcaactgctacttccccctgaggagctacggcttcaggcccacctacggcgtgggccaccagccctacagggtggtggtgctgagcttcgagctgctgcacgcccccgccaccgtgtgcggccccaagaagagcaccaacctggtgaagaacaagtgcgtgaacttcaacttcaacggcctgaccggcaccggcgtgctgaccgagagcaacaagaagttcctgcccttccagcagttcggcagggacatcgccgacaccaccgacgccgtgagggacccccagaccctggagatcctggacatcaccccctgcagcttcggcggcgtgagcgtgatcacccccggcaccaacaccagcaaccaggtggccgtgctgtaccagggcgtgaactgcaccgaggtgcccgtggccatccacgccgaccagctgacccccacctggagggtgtacagcaccggcagcaacgtgttccagaccagggccggctgcctgatcggcgccgagtacgtgaacaacagctacgagtgcgacatccccatcggcgccggcatctgcgccagctaccagacccagaccaagagccaccagcaggcccagagcgtggccagccagagcatcatcgcctacaccatgagcctgggcgccgagaacagcgtggcctacagcaacaacagcatcgccatccccaccaacttcaccatcagcgtgaccaccgagatcctgcccgtgagcatgaccaagaccagcgtggactgcaccatgtacatctgcggcgacagcaccgagtgcagcaacctgctgctgcagtacggcagcttctgcacccagctgaagagggccctgaccggcatcgccgtggagcaggacaagaacacccaggaggtgttcgcccaggtgaagcagatctacaagaccccccccatcaagtacttcggcggcttcaacttcagccagatcctgcccgaccccagcaagcccagcaagaggagcttcatcgaggacctgctgttcaacaaggtgaccctggccgacgccggcttcatcaagcagtacggcgactgcctgggcgacatcgccgccagggacctgatctgcgcccagaagttcaacggcctgaccgtgctgccccccctgctgaccgacgagatgatcgcccagtacaccagcgccctgctggccggcaccatcaccagcggctggaccttcggcgccggcgccgccctgcagatccccttcgccatgcagatggcctacaggttcaacggcatcggcgtgacccagaacgtgctgtacgagaaccagaagctgatcgccaaccagttcaacagcgccatcggcaagatccaggacagcctgagcagcaccgccagcgccctgggcaagctgcaggacgtggtgaaccacaacgcccaggccctgaacaccctggtgaagcagctgagcagcaagttcggcgccatcagcagcgtgctgaacgacatcctgagcaggctggacccccccgaggccgaggtgcagatcgacaggctgatcaccggcaggctgcagagcctgcagacctacgtgacccagcagctgatcagggccgccgagatcagggccagcgccaacctggccgccaccaagatgagcgagtgcgtgctgggccagagcaagagggtggacttctgcggcaagggctaccacctgatgagcttcccccagagcgccccccacggcgtggtgttcctgcacgtgacctacgtgcccgcccaggagaagaacttcaccaccgcccccgccatctgccacgacggcaaggcccacttccccagggagggcgtgttcgtgagcaacggcacccactggttcgtgacccagaggaacttctacgagccccagatcatcaccaccgacaacaccttcgtgagcggcaactgcgacgtggtgatcggcatcgtgaacaacaccgtgtacgaccccctgcagcccgagctggacagcttcaaggaggagctggacaagtacttcaagaaccacaccagccccgacgtggacctgggcgacatcagcggcatcaacgccagcgtggtgaacatccagaaggagatcgacaggctgaacgaggtggccaagaacctgaacgagagcctgatcgacctgcaggagctgggcaagtacgagcagtacatcaagtggccctggtacatctggctgggcttcatcgccggcctgatcgccatcgtgatggtgaccatcatgctgtgctgcatgaccagctgctgcagctgcctgaagggctgctgcagctgcggcagctgctgcaagttcgacgaggacgacagcgagcccgtgctgaagggcgtgaagctgcactacaccggaagcggagccacgaacttctctctgttaaagcaagcaggagatgttgaagaaaaccccgggcctatgaaggcaatactagtagttctgctatatacatttgcaaccgcaaatgcagacacattatgtataggttatcatgcgaacaactcaacagacactgtagacacagtactagaaaagaatgtaacagtaacacactctgttaaccttctagaagacaagcataacgggaaactatgcaaactaagaggggtagccccattgcatttgggtaaatgtaacattgctggctggatcctgggaaatccagagtgtgaatcactctccacagcaagctcatggtcctacattgtggaaacatctagttcagacaatggaacgtgttacccaggagatttcatcgattatgaggagctaagagagcaattgagctcagtgtcatcatttgaaaggtttgagatattccccaagacaagttcatggcccaatcatgactcgaacaaaggtgtaacgacagcatgtcctcatgctggagcaaaaagcttctacaaaaatttaatatggctagttaaaaaaggaaattcatacccaaagctcagcaaatcctacattaatgataaagggaaagaagtcctcgtgctatggggcattcaccatccacctactagtgctgaccaacaaagtctctatcagaatgcagatgcatatgtttttgtggggacatcaagatacagcaagaagttcaagccggaaatagcaataaggcccaaagtgagggatcaagaagggagaatgaactattactggacactagtagagccgggagacaaaataacattcgaagcaactggaaatctagtggtaccgagatatgcattcgcaatggaaagaaatgctggatctggtattatcatttcagatacaccagtccacgattgcaatacaacttgtcagacacccaagggtgctataaacaccagcctcccatttcagaacatacatccgatcacaattggaaaatgtccaaaatatgtaaaaagcacaaaattgagactggccacaggattgaggaatgtcccgtccattcaatctagaggcctatttggggccattgccggtttcattgaaggggggtggacagggatggtagatggatggtacggttatcaccatcaaaatgagcaggggtcaggatatgcagccgacctgaagagcacacagaatgccattgacgagattactaacaaagtaaactctgttattgaaaaaatgaatacacagttcacagcagtaggtaaagagttcaaccacctggaaaaaagaatagagaatttaaataaaaaagttgatgatggtttcctggacatttggacttacaatgccgaactgttggttctattggaaaatgaaagaactttggactaccacgattcaaaggtgaagaacttatatgaaaaggtaagaagccagttaaaaaacaatgccaaggaaattggaaacggctgctttgaattttaccacaaatgtgataacacgtgcatggaaagtgtcaaaaatgggacttatgactacccaaaatactcagaggaagcaaaattaaacagagaagaaatagatggggtaaagctggaatcaacaaggatttaccagattttggcgatctattcaaccgtcgccagttcattggtactggtagtctccctgggggcaatcagtttctggatgtgctctaatgggtctctacagtgtagaatatgtatttaaggaagcggagccacgaacttctctctgttaaagcaagcaggagatgttgaagaaaaccccgggcctagcaaaagcaggggataattctattaaccatgaagactatcattgctttgagctacattctatgtctggttttcgctcaaaaacttcctggaaatgacaatagcactgcaacgctgtgccttgggcaccatgcagtaccaaacggaacgatagtgaaaacaatcacgaatgaccaaattgaagttactaatgctactgagctggttcagaattcctcaataggtgaaatatgcgacagtcctcatcagatccttgatggagaaaactgcacactaatagatgctctattgggagaccctcagtgtgatggctttcaaaataagaaatgggacctttttgttgaacgaagcaaagcctacagcaactgttacccttatgatgtgccggattatgcctcccttaggtcactagttgcctcatccggcacactggagtttaacaatgaaagcttcaattgggctggagtcactcaaaacggaacaagttctgcttgcataaggggatctaatagtagtttctttagtagattaaattggttgacccacttaaacttcaagtacccagcattgaacgtgactatgccaaacaatgaacaatttgacaaattgtacatttggggggttcaccacccgggtacggacaaggaccaaatcttcctgtatgctcaatcatcaggaagaatcacagtatctaccaaaagaagccaacaagctgtaatcccgaatatcggatctagacccagaataaggaatatccctagcagaataagcatctattggacaatagtaaaaccgggagacatacttttgattaacagcacagggaatctaattgctcctaggggttacttcaaaatacgaagtgggaaaagctcaataatgagatcagatgcacccattggcaaatgcaagtctgaatgcatcactccaaatggaagcattcccaatgacaaaccattccaaaatgtaaacaggatcacatacggggcctgtcccagatatgttaagcaaagcactctgaaattggcaacaggaatgcgaaatgtaccagagaaacaaactagaggcatatttggcgcaatagcgggtttcatagaaaatggttgggagggaatggtggatggttggtacggtttcaggcatcaaaattctgagggaagaggacaagcagcagatctcaaaagcactcaagcagcaatcgatcaaatcaatgggaagctgaatcgattgatcgggaaaaccaacgagaaattccatcagattgagaaagaattctcagaagtagaagggagaattcaggaccttgagaaatatgttgaggacacaaaaatagatctctggtcatacaacgcagagcttcttgttgccctggaaaaccaacatacaattgatctaactgactcagaaatgaacaaactgtttgaaaaaacaaagaagcaactgagggaaaatgctgaggatatgggcaatggttgtttcaaaatataccacaaatgtgacaatgcctgcataggatcaatcagaaatggaacttatgaccacgatgtatacagggatgaagcattaaacaaccggttccagatcaagggagttgagctgaagtcagggtacaaagattggatcctatggatttcctttgccatatcatgttttttgctttgtgttgctttgttggggttcatcatgtgggcctgccaaaagggcaacattaggtgcaacatttgcatttgagtgcattaattaaaaacacccttgtttctactggaagcggagccacgaacttctctctgttaaagcaagcaggagatgttgaagaaaaccccgggcctattttctaatatccacaaaatgaaggcaataattgtactactcatggtagtaacatccaatgcagatcgaatctgcactgggataacatcgtcaaactcaccacatgtcgtcaaaactgctactcaaggggaggtcaacgtgaccggtgtaataccactgacaacaacacccaccaaatctcattttgcaaatctcaaaggaacagaaaccagggggaaactatgcccaaaatgcctcaactgcacagatctggatgtagccttgggcagaccaaaatgcacagggaaaataccctctgcaagggtttcaatactccatgaagtcagacctgttacatctgggtgctttcctataatgcacgatagaacaaaaattagacagctgcctaaccttctccgaggatacgaacatgtcaggttatcaactcacaacgttatcaatgcaaaagatgcaccaggaagaccctacgaaattggaacctcagggtcttgccctaacattaccaatggaaacggattcttcgcaacaatggcttgggccgtcccaaaaaacaaaacagcaacaaatccattaacaatagaagtaccatacatttgtacagaaggagaagaccaaattaccgtttgggggttccactctgacaacgagacccaaatggcaaagctctatggggactcaaagccccagaagttcacctcatctgccaacggagtgaccacacattacgtttcacagattggtggcttcccaaatcaaacagaagacggaggactaccacaaagtggcagaattgttgttgattacatggtgcagaaatctggaaaaacaggaacaattacctatcaaagaggtattttattgcctcaaaaagtgtggtgcgcaagtggcaggagcaaggtaataaaaggatccttgcccttaattggagaagcagattgcctccatgaaaaatacggtggattaaacaaaagcaagccttactacacaggggaacatgcaaaggccataggaaattgcccaatatgggtgaaaacacccttgaagctggccaatggaaccaaatatagaccccctgcaaaactattaaaggaaagaggtttcttcggagccattgctggtttcttagagggaggatgggaaggaatgattgcaggttggcacggatacacatcccatggggcacatggagtagcggtggcagctgaccttaagagcactcaagaggccataaacaagataacaaaaaatctcaactctttgagtgagctggaagtaaagaatcttcaaagactaagcggtgccatggatgaactccacaacgaaatactagaactagatgagaaagtggatgatctcagagctgacacaataagctcacaaatagaactcgcagtcctgctttccaatgaaggaataataaacagtgaagatgaacatctcttggcgcttgaaagaaagctgaagaaaatgctgggcccctctgctgtagagatagggaatggatgctttgaaaccaaacacaagtgcaaccagacctgcctcgacagaatagctgctggtacctttgatgcaggagaattttctctccccacctttgattcactgaatattactgctgcatctttaaatgacgacggattggacaatcatactatactgctttactactcaactgctgcctccagtttggctgtaacactgatgatagctatctttgttgtttatatggtctccagagacaatgtttcttgctccatttgtctataaggaaagttaagccctgtattttcctttattgtagtgcttgtttgcttgttgtcattacaaagaaacgttattgaaaaatggaagcggagccacgaacttctctctgttaaagcaagcaggagatgttgaagaaaaccccgggcctttcggagctattgctggtttcttggaaggaggatgggaaggaatgattgcaggttggcacggatacacatctcatggagcacatggagtagcagtggcagcagaccttaagagtacccatgatga

SEQ ID NO: 413 - DNA, 9518 bp, synthetic construct
  source 1..9518: mol_type = other DNA; note = Hybrid Vaccine Candidate 25
atgttcgtgttcctggtgctgctgcccctggtgagcagccagtgcgtgaacctgaccaccaggacccagctgccccccgcctacaccaacagcttcaccaggggcgtgtactaccccgacaaggtgttcaggagcagcgtgctgcacagcacccaggacctgttcctgcccttcttcagcaacgtgacctggttccacgccatccacgtgagcggcaccaacggcaccaagaggttcgacaaccccgtgctgcccttcaacgacggcgtgtacttcgccagcaccgagaagagcaacatcatcaggggctggatcttcggcaccaccctggacagcaagacccagagcctgctgatcgtgaacaacgccaccaacgtggtgatcaaggtgtgcgagttccagttctgcaacgaccccttcctgggcgtgtactaccacaagaacaacaagagctggatggagagcgagttcagggtgtacagcagcgccaacaactgcaccttcgagtacgtgagccagcccttcctgatggacctggagggcaagcagggcaacttcaagaacctgagggagttcgtgttcaagaacatcgacggctacttcaagatctacagcaagcacacccccatcaacctggtgagggacctgccccagggcttcagcgccctggagcccctggtggacctgcccatcggcatcaacatcaccaggttccagaccctgctggccctgcacaggagctacctgacccccggcgacagcagcagcggctggaccgccggcgccgccgcctactacgtgggctacctgcagcccaggaccttcctgctgaagtacaacgagaacggcaccatcaccgacgccgtggactgcgccctggaccccctgagcgagaccaagtgcaccctgaagagcttcaccgtggagaagggcatctaccagaccagcaacttcagggtgcagcccaccgagagcatcgtgaggttccccaacatcaccaacctgtgccccttcggcgaggtgttcaacgccaccaggttcgccagcgtgtacgcctggaacaggaagaggatcagcaactgcgtggccgactacagcgtgctgtacaacagcgccagcttcagcaccttcaagtgctacggcgtgagccccaccaagctgaacgacctgtgcttcaccaacgtgtacgccgacagcttcgtgatcaggggcgacgaggtgaggcagatcgcccccggccagaccggcaagatcgccgactacaactacaagctgcccgacgacttcaccggctgcgtgatcgcctggaacagcaacaacctggacagcaaggtgggcggcaactacaactacctgtacaggctgttcaggaagagcaacctgaagcccttcgagagggacatcagcaccgagatctaccaggccggcagcaccccctgcaacggcgtggagggcttcaactgctacttccccctgcagagctacggcttccagcccaccaacggcgtgggctaccagccctacagggtggtggtgctgagcttcgagctgctgcacgcccccgccaccgtgtgcggccccaagaagagcaccaacctggtgaagaacaagtgcgtgaacttcaacttcaacggcctgaccggcaccggcgtgctgaccgagagcaacaagaagttcctgcccttccagcagttcggcagggacatcgccgacaccaccgacgccgtgagggacccccagaccctggagatcctggacatcaccccctgcagcttcggcggcgtgagcgtgatcacccccggcaccaacaccagcaaccaggtggccgtgctgtaccaggacgtgaactgcaccgaggtgcccgtggccatccacgccgaccagctgacccccacctggagggtgtacagcaccggcagcaacgtgttccagaccagggccggctgcctgatcggcgccgagcacgtgaacaacagctacgagtgcgacatccccatcggcgccggcatctgcgccagctaccagacccagaccaacagccccggcagcgccagcagcgtggccagccagagcatcatcgcctacaccatgagcctgggcgccgagaacagcgtggcctacagcaacaacagcatcgccatccccaccaacttcaccatcagcgtgaccaccgagatcctgcccgtgagcatgaccaagaccagcgtggactgcaccatgtacatctgcggcgacagcaccgagtgcagcaacctgctgctgcagtacggcagcttctgcacccagctgaacagggccctgaccggcatcgccgtggagcaggacaagaacacccaggaggtgttcgcccaggtgaagcagatctacaagaccccccccatcaaggacttcggcggcttcaacttcagccagatcctgcccgaccccagcaagcccagcaagaggagccccatcgaggacctgctgttcaacaaggtgaccctggccgacgccggcttcatcaagcagtacggcgactgcctgggcgacatcgccgccagggacctgatctgcgcccagaagttcaacggcctgaccgtgctgccccccctgctgaccgacgagatgatcgcccagtacaccagcgccctgctggccggcaccatcaccagcggctggaccttcggcgccggccccgccctgcagatccccttccccatgcagatggcctacaggttcaacggcatcggcgtgacccagaacgtgctgtacgagaaccagaagctgatcgccaaccagttcaacagcgccatcggcaagatccaggacagcctgagcagcacccccagcgccctgggcaagctgcaggacgtggtgaaccagaacgcccaggccctgaacaccctggtgaagcagctgagcagcaacttcggcgccatcagcagcgtgctgaacgacatcctgagcaggctggacccccccgaggccgaggtgcagatcgacaggctgatcaccggcaggctgcagagcctgcagacctacgtgacccagcagctgatcagggccgccgagatcagggccagcgccaacctggccgccaccaagatgagcgagtgcgtgctgggccagagcaagagggtggacttctgcggcaagggctaccacctgatgagcttcccccagagcgccccccacggcgtggtgttcctgcacgtgacctacgtgcccgcccaggagaagaacttcaccaccgcccccgccatctgccacgacggcaaggcccacttccccagggagggcgtgttcgtgagcaacggcacccactggttcgtgacccagaggaacttctacgagccccagatcatcaccaccgacaacaccttcgtgagcggcaactgcgacgtggtgatcggcatcgtgaacaacaccgtgtacgaccccctgcagcccgagctggacagcttcaaggaggagctggacaagtacttcaagaaccacaccagccccgacgtggacctgggcgacatcagcggcatcaacgccagcgtggtgaacatccagaaggagatcgacaggctgaacgaggtggccaagaacctgaacgagagcctgatcgacctgcaggagctgggcaagtacgagcagtacatcaagtggccctggtacatctggctgggcttcatcgccggcctgatcgccatcgtgatggtgaccatcatgctgtgctgcatgaccagctgctgcagctgcctgaagggctgctgcagctgcggcagctgctgcaagttcgacgaggacgacagcgagcccgtgctgaagggcgtgaagctgcactacaccggaagcggagccacgaacttctctctgttaaagcaagcaggagatgttgaagaaaaccccgggcctatgaaggcaatactagtagttctgctatatacatttgcaaccgcaaatgcagacacattatgtataggttatcatgcgaacaactcaacagacactgtagacacagtactagaaaagaatgtaacagtaacacactctgttaaccttctagaagacaagcataacgggaaactatgcaaactaagaggggtagccccattgcatttgggtaaatgtaacattgctggctggatcctgggaaatccagagtgtgaatcactctccacagcaagctcatggtcctacattgtggaaacatctagttcagacaatggaacgtgttacccaggagatttcatcgattatgaggagctaagagagcaattgagctcagtgtcatcatttgaaaggtttgagatattccccaagacaagttcatggcccaatcatgactcgaacaaaggtgtaacgacagcatgtcctcatgctggagcaaaaagcttctacaaaaatttaatatggctagttaaaaaaggaaattcatacccaaagctcagcaaatcctacattaatgataaagggaaagaagtcctcgtgctatggggcattcaccatccacctactagtgctgaccaacaaagtctctatcagaatgcagatgcatatgtttttgtggggacatcaagatacagcaagaagttcaagccggaaatagcaataaggcccaaagtgagggatcaagaagggagaatgaactattactggacactagtagagccgggagacaaaataacattcgaagcaactggaaatctagtggtaccgagatatgcattcgcaatggaaagaaatgctggatctggtattatcatttcagatacaccagtccacgattgcaatacaacttgtcagacacccaagggtgctataaacaccagcctcccatttcagaacatacatccgatcacaattggaaaatgtccaaaatatgtaaaaagcacaaaattgagactggccacaggattgaggaatgtcccgtccattcaatctagaggcctatttggggccattgccggtttcattgaaggggggtggacagggatggtagatggatggtacggttatcaccatcaaaatgagcaggggtcaggatatgcagccgacctgaagagcacacagaatgccattgacgagattactaacaaagtaaactctgttattgaaaaaatgaatacacagttcacagcagtaggtaaagagttcaaccacctggaaaaaagaatagagaatttaaataaaaaagttgatgatggtttcctggacatttggacttacaatgccgaactgttggttctattggaaaatgaaagaactttggactaccacgattcaaaggtgaagaacttatatgaaaaggtaagaagccagttaaaaaacaatgccaaggaaattggaaacggctgctttgaattttaccacaaatgtgataacacgtgcatggaaagtgtcaaaaatgggacttatgactacccaaaatactcagaggaagcaaaattaaacagagaagaaatagatggggtaaagctggaatcaacaaggatttaccagattttggcgatctattcaaccgtcgccagttcattggtactggtagtctccctgggggcaatcagtttctggatgtgctctaatgggtctctacagtgtagaatatgtatttaaggaagcggagccacgaacttctctctgttaaagcaagcaggagatgttgaagaaaaccccgggcctagcaaaagcaggggataattctattaaccatgaagactatcattgctttgagctacattctatgtctggttttcgctcaaaaacttcctggaaatgacaatagcactgcaacgctgtgccttgggcaccatgcagtaccaaacggaacgatagtgaaaacaatcacgaatgaccaaattgaagttactaatgctactgagctggttcagaattcctcaataggtgaaatatgcgacagtcctcatcagatccttgatggagaaaactgcacactaatagatgctctattgggagaccctcagtgtgatggctttcaaaataagaaatgggacctttttgttgaacgaagcaaagcctacagcaactgttacccttatgatgtgccggattatgcctcccttaggtcactagttgcctcatccggcacactggagtttaacaatgaaagcttcaattgggctggagtcactcaaaacggaacaagttctgcttgcataaggggatctaatagtagtttctttagtagattaaattggttgacccacttaaacttcaagtacccagcattgaacgtgactatgccaaacaatgaacaatttgacaaattgtacatttggggggttcaccacccgggtacggacaaggaccaaatcttcctgtatgctcaatcatcaggaagaatcacagtatctaccaaaagaagccaacaagctgtaatcccgaatatcggatctagacccagaataaggaatatccctagcagaataagcatctattggacaatagtaaaaccgggagacatacttttgattaacagcacagggaatctaattgctcctaggggttacttcaaaatacgaagtgggaaaagctcaataatgagatcagatgcacccattggcaaatgcaagtctgaatgcatcactccaaatggaagcattcccaatgacaaaccattccaaaatgtaaacaggatcacatacggggcctgtcccagatatgttaagcaaagcactctgaaattggcaacaggaatgcgaaatgtaccagagaaacaaactagaggcatatttggcgcaatagcgggtttcatagaaaatggttgggagggaatggtggatggttggtacggtttcaggcatcaaaattctgagggaagaggacaagcagcagatctcaaaagcactcaagcagcaatcgatcaaatcaatgggaagctgaatcgattgatcgggaaaaccaacgagaaattccatcagattgagaaagaattctcagaagtagaagggagaattcaggaccttgagaaatatgttgaggacacaaaaatagatctctggtcatacaacgcagagcttcttgttgccctggaaaaccaacatacaattgatctaactgactcagaaatgaacaaactgtttgaaaaaacaaagaagcaactgagggaaaatgctgaggatatgggcaatggttgtttcaaaatataccacaaatgtgacaatgcctgcataggatcaatcagaaatggaacttatgaccacgatgtatacagggatgaagcattaaacaaccggttccagatcaagggagttgagctgaagtcagggtacaaagattggatcctatggatttcctttgccatatcatgttttttgctttgtgttgctttgttggggttcatcatgtgggcctgccaaaagggcaacattaggtgcaacatttgcatttgagtgcattaattaaaaacacccttgtttctactggaagcggagccacgaacttctctctgttaaagcaagcaggagatgttgaagaaaaccccgggcctattttctaatatccacaaaatgaaggcaataattgtactactcatggtagtaacatccaatgcagatcgaatctgcactgggataacatcgtcaaactcaccacatgtcgtcaaaactgctactcaaggggaggtcaacgtgaccggtgtaataccactgacaacaacacccaccaaatctcattttgcaaatctcaaaggaacagaaaccagggggaaactatgcccaaaatgcctcaactgcacagatctggatgtagccttgggcagaccaaaatgcacagggaaaataccctctgcaagggtttcaatactccatgaagtcagacctgttacatctgggtgctttcctataatgcacgatagaacaaaaattagacagctgcctaaccttctccgaggatacgaacatgtcaggttatcaactcacaacgttatcaatgcaaaagatgcaccaggaagaccctacgaaattggaacctcagggtcttgccctaacattaccaatggaaacggattcttcgcaacaatggcttgggccgtcccaaaaaacaaaacagcaacaaatccattaacaatagaagtaccatacatttgtacagaaggagaagaccaaattaccgtttgggggttccactctgacaacgagacccaaatggcaaagctctatggggactcaaagccccagaagttcacctcatctgccaacggagtgaccacacattacgtttcacagattggtggcttcccaaatcaaacagaagacggaggactaccacaaagtggcagaattgttgttgattacatggtgcagaaatctggaaaaacaggaacaattacctatcaaagaggtattttattgcctcaaaaagtgtggtgcgcaagtggcaggagcaaggtaataaaaggatccttgcccttaattggagaagcagattgcctccatgaaaaatacggtggattaaacaaaagcaagccttactacacaggggaacatgcaaaggccataggaaattgcccaatatgggtgaaaacacccttgaagctggccaatggaaccaaatatagaccccctgcaaaactattaaaggaaagaggtttcttcggagccattgctggtttcttagagggaggatgggaaggaatgattgcaggttggcacggatacacatcccatggggcacatggagtagcggtggcagctgaccttaagagcactcaagaggccataaacaagataacaaaaaatctcaactctttgagtgagctggaagtaaagaatcttcaaagactaagcggtgccatggatgaactccacaacgaaatactagaactagatgagaaagtggatgatctcagagctgacacaataagctcacaaatagaactcgcagtcctgctttccaatgaaggaataataaacagtgaagatgaacatctcttggcgcttgaaagaaagctgaagaaaatgctgggcccctctgctgtagagatagggaatggatgctttgaaaccaaacacaagtgcaaccagacctgcctcgacagaatagctgctggtacctttgatgcaggagaattttctctccccacctttgattcactgaatattactgctgcatctttaaatgacgacggattggacaatcatactatactgctttactactcaactgctgcctccagtttggctgtaacactgatgatagctatctttgttgtttatatggtctccagagacaatgtttcttgctccatttgtctataaggaaagttaagccctgtattttcctttattgtagtgcttgtttgcttgttgtcattacaaagaaacgttattgaaaaatggaagcggagccacgaacttctctctgttaaagcaagcaggagatgttgaagaaaaccccgggcctttcggagctattgctggtttcttggaaggaggatgggaaggaatgattgcaggttggcacggatacacatctcatggagcacatggagtagcagtggcagcagaccttaagagtacccatgatga

SEQ ID NO: 414 - DNA, 9518 bp, synthetic construct
  source 1..9518: mol_type = other DNA; note = Hybrid Vaccine Candidate 26
atgttcgtgttcctggtgctgctgcccctggtgagcagccagtgcgtgaacctgaccaccaggacccagctgccccccgcctacaccaacagcttcaccaggggcgtgtactaccccgacaaggtgttcaggagcagcgtgctgcacagcacccaggacctgttcctgcccttcttcagcaacgtgacctggttccacgccatccacgtgagcggcaccaacggcaccaagaggttcgacaaccccgtgctgcccttcaacgacggcgtgtacttcgccagcaccgagaagagcaacatcatcaggggctggatcttcggcaccaccctggacagcaagacccagagcctgctgatcgtgaacaacgccaccaacgtggtgatcaaggtgtgcgagttccagttctgcaacgaccccttcctgggcgtgtactaccacaagaacaacaagagctggatggagagcgagttcagggtgtacagcagcgccaacaactgcaccttcgagtacgtgagccagcccttcctgatggacctggagggcaagcagggcaacttcaagaacctgagggagttcgtgttcaagaacatcgacggctacttcaagatctacagcaagcacacccccatcaacctggtgagggacctgccccagggcttcagcgccctggagcccctggtggacctgcccatcggcatcaacatcaccaggttccagaccctgctggccctgcacaggagctacctgacccccggcgacagcagcagcggctggaccgccggcgccgccgcctactacgtgggctacctgcagcccaggaccttcctgctgaagtacaacgagaacggcaccatcaccgacgccgtggactgcgccctggaccccctgagcgagaccaagtgcaccctgaagagcttcaccgtggagaagggcatctaccagaccagcaacttcagggtgcagcccaccgagagcatcgtgaggttccccaacatcaccaacctgtgccccttcggcgaggtgttcaacgccaccaggttcgccagcgtgtacgcctggaacaggaagaggatcagcaactgcgtggccgactacagcgtgctgtacaacagcgccagcttcagcaccttcaagtgctacggcgtgagccccaccaagctgaacgacctgtgcttcaccaacgtgtacgccgacagcttcgtgatcaggggcgacgaggtgaggcagatcgcccccggccagaccggcaagatcgccgactacaactacaagctgcccgacgacttcaccggctgcgtgatcgcctggaacagcaacaacctggacagcaaggtgggcggcaactacaactacctgtacaggctgttcaggaagagcaacctgaagcccttcgagagggacatcagcaccgagatctaccaggccggcagcaccccctgcaacggcgtggagggcttcaactgctacttccccctgcagagctacggcttccagcccaccaacggcgtgggctaccagccctacagggtggtggtgctgagcttcgagctgctgcacgcccccgccaccgtgtgcggccccaagaagagcaccaacctggtgaagaacaagtgcgtgaacttcaacttcaacggcctgaccggcaccggcgtgctgaccgagagcaacaagaagttcctgcccttccagcagttcggcagggacatcgccgacaccaccgacgccgtgagggacccccagaccctggagatcctggacatcaccccctgcagcttcggcggcgtgagcgtgatcacccccggcaccaacaccagcaaccaggtggccgtgctgtaccaggacgtgaactgcaccgaggtgcccgtggccatccacgccgaccagctgacccccacctggagggtgtacagcaccggcagcaacgtgttccagaccagggccggctgcctgatcggcgccgagcacgtgaacaacagctacgagtgcgacatccccatcggcgccggcatctgcgccagctaccagacccagaccaacagccccaggagggccaggagcgtggccagccagagcatcatcgcctacaccatgagcctgggcgccgagaacagcgtggcctacagcaacaacagcatcgccatccccaccaacttcaccatcagcgtgaccaccgagatcctgcccgtgagcatgaccaagaccagcgtggactgcaccatgtacatctgcggcgacagcaccgagtgcagcaacctgctgctgcagtacggcagcttctgcacccagctgaacagggccctgaccggcatcgccgtggagcaggacaagaacacccaggaggtgttcgcccaggtgaagcagatctacaagaccccccccatcaaggacttcggcggcttcaacttcagccagatcctgcccgaccccagcaagcccagcaagaggagcttcatcgaggacctgctgttcaacaaggtgaccctggccgacgccggcttcatcaagcagtacggcgactgcctgggcgacatcgccgccagggacctgatctgcgcccagaagttcaacggcctgaccgtgctgccccccctgctgaccgacgagatgatcgcccagtacaccagcgccctgctggccggcaccatcaccagcggctggaccttcggcgccggcgccgccctgcagatccccttcgccatgcagatggcctacaggttcaacggcatcggcgtgacccagaacgtgctgtacgagaaccagaagctgatcgccaaccagttcaacagcgccatcggcaagatccaggacagcctgagcagcaccgccagcgccctgggcaagctgcaggacgtggtgaaccagaacgcccaggccctgaacaccctggtgaagcagctgagcagcaacttcggcgccatcagcagcgtgctgaacgacatcctgagcaggctggacccccccgaggccgaggtgcagatcgacaggctgatcaccggcaggctgcagagcctgcagacctacgtgacccagcagctgatcagggccgccgagatcagggccagcgccaacctggccgccaccaagatgagcgagtgcgtgctgggccagagcaagagggtggacttctgcggcaagggctaccacctgatgagcttcccccagagcgccccccacggcgtggtgttcctgcacgtgacctacgtgcccgcccaggagaagaacttcaccaccgcccccgccatctgccacgacggcaaggcccacttccccagggagggcgtgttcgtgagcaacggcacccactggttcgtgacccagaggaacttctacgagccccagatcatcaccaccgacaacaccttcgtgagcggcaactgcgacgtggtgatcggcatcgtgaacaacaccgtgtacgaccccctgcagcccgagctggacagcttcaaggaggagctggacaagtacttcaagaaccacaccagccccgacgtggacctgggcgacatcagcggcatcaacgccagcgtggtgaacatccagaaggagatcgacaggctgaacgaggtggccaagaacctgaacgagagcctgatcgacctgcaggagctgggcaagtacgagcagtacatcaagtggccctggtacatctggctgggcttcatcgccggcctgatcgccatcgtgatggtgaccatcatgctgtgctgcatgaccagctgctgcagctgcctgaagggctgctgcagctgcggcagctgctgcaagttcgacgaggacgacagcgagcccgtgctgaagggcgtgaagctgcactacaccggaagcggagccacgaacttctctctgttaaagcaagcaggagatgttgaagaaaaccccgggcctatgaaggcaatactagtagttctgctatatacatttgcaaccgcaaatgcagacacattatgtataggttatcatgcgaacaactcaacagacactgtagacacagtactagaaaagaatgtaacagtaacacactctgttaaccttctagaagacaagcataacgggaaactatgcaaactaagaggggtagccccattgcatttgggtaaatgtaacattgctggctggatcctgggaaatccagagtgtgaatcactctccacagcaagctcatggtcctacattgtggaaacatctagttcagacaatggaacgtgttacccaggagatttcatcgattatgaggagctaagagagcaattgagctcagtgtcatcatttgaaaggtttgagatattccccaagacaagttcatggcccaatcatgactcgaacaaaggtgtaacgacagcatgtcctcatgctggagcaaaaagcttctacaaaaatttaatatggctagttaaaaaaggaaattcatacccaaagctcagcaaatcctacattaatgataaagggaaagaagtcctcgtgctatggggcattcaccatccacctactagtgctgaccaacaaagtctctatcagaatgcagatgcatatgtttttgtggggacatcaagatacagcaagaagttcaagccggaaatagcaataaggcccaaagtgagggatcaagaagggagaatgaactattactggacactagtagagccgggagacaaaataacattcgaagcaactggaaatctagtggtaccgagatatgcattcgcaatggaaagaaatgctggatctggtattatcatttcagatacaccagtccacgattgcaatacaacttgtcagacacccaagggtgctataaacaccagcctcccatttcagaacatacatccgatcacaattggaaaatgtccaaaatatgtaaaaagcacaaaattgagactggccacaggattgaggaatgtcccgtccattcaatctagaggcctatttggggccattgccggtttcattgaaggggggtggacagggatggtagatggatggtacggttatcaccatcaaaatgagcaggggtcaggatatgcagccgacctgaagagcacacagaatgccattgacgagattactaacaaagtaaactctgttattgaaaaaatgaatacacagttcacagcagtaggtaaagagttcaaccacctggaaaaaagaatagagaatttaaataaaaaagttgatgatggtttcctggacatttggacttacaatgccgaactgttggttctattggaaaatgaaagaactttggactaccacgattcaaaggtgaagaacttatatgaaaaggtaagaagccagttaaaaaacaatgccaaggaaattggaaacggctgctttgaattttaccacaaatgtgataacacgtgcatggaaagtgtcaaaaatgggacttatgactacccaaaatactcagaggaagcaaaattaaacagagaagaaatagatggggtaaagctggaatcaacaaggatttaccagattttggcgatctattcaaccgtcgccagttcattggtactggtagtctccctgggggcaatcagtttctggatgtgctctaatgggtctctacagtgtagaatatgtatttaaggaagcggagccacgaacttctctctgttaaagcaagcaggagatgttgaagaaaaccccgggcctagcaaaagcaggggataattctattaaccatgaagactatcattgctttgagctacattctatgtctggttttcgctcaaaaacttcctggaaatgacaatagcactgcaacgctgtgccttgggcaccatgcagtaccaaacggaacgatagtgaaaacaatcacgaatgaccaaattgaagttactaatgctactgagctggttcagaattcctcaataggtgaaatatgcgacagtcctcatcagatccttgatggagaaaactgcacactaatagatgctctattgggagaccctcagtgtgatggctttcaaaataagaaatgggacctttttgttgaacgaagcaaagcctacagcaactgttacccttatgatgtgccggattatgcctcccttaggtcactagttgcctcatccggcacactggagtttaacaatgaaagcttcaattgggctggagtcactcaaaacggaacaagttctgcttgcataaggggatctaatagtagtttctttagtagattaaattggttgacccacttaaacttcaagtacccagcattgaacgtgactatgccaaacaatgaacaatttgacaaattgtacatttggggggttcaccacccgggtacggacaaggaccaaatcttcctgtatgctcaatcatcaggaagaatcacagtatctaccaaaagaagccaacaagctgtaatcccgaatatcggatctagacccagaataaggaatatccctagcagaataagcatctattggacaatagtaaaaccgggagacatacttttgattaacagcacagggaatctaattgctcctaggggttacttcaaaatacgaagtgggaaaagctcaataatgagatcagatgcacccattggcaaatgcaagtctgaatgcatcactccaaatggaagcattcccaatgacaaaccattccaaaatgtaaacaggatcacatacggggcctgtcccagatatgttaagcaaagcactctgaaattggcaacaggaatgcgaaatgtaccagagaaacaaactagaggcatatttggcgcaatagcgggtttcatagaaaatggttgggagggaatggtggatggttggtacggtttcaggcatcaaaattctgagggaagaggacaagcagcagatctcaaaagcactcaagcagcaatcgatcaaatcaatgggaagctgaatcgattgatcgggaaaaccaacgagaaattccatcagattgagaaagaattctcagaagtagaagggagaattcaggaccttgagaaatatgttgaggacacaaaaatagatctctggtcatacaacgcagagcttcttgttgccctggaaaaccaacatacaattgatctaactgactcagaaatgaacaaactgtttgaaaaaacaaagaagcaactgagggaaaatgctgaggatatgggcaatggttgtttcaaaatataccacaaatgtgacaatgcctgcataggatcaatcagaaatggaacttatgaccacgatgtatacagggatgaagcattaaacaaccggttccagatcaagggagttgagctgaagtcagggtacaaagattggatcctatggatttcctttgccatatcatgttttttgctttgtgttgctttgttggggttcatcatgtgggcctgccaaaagggcaacattaggtgcaacatttgcatttgagtgcattaattaaaaacacccttgtttctactggaagcggagccacgaacttctctctgttaaagcaagcaggagatgttgaagaaaaccccgggcctattttctaatatccacaaaatgaaggcaataattgtactactcatggtagtaacatccaatgcagatcgaatctgcactgggataacatcgtcaaactcaccacatgtcgtcaaaactgctactcaaggggaggtcaacgtgaccggtgtaataccactgacaacaacacccaccaaatctcattttgcaaatctcaaaggaacagaaaccagggggaaactatgcccaaaatgcctcaactgcacagatctggatgtagccttgggcagaccaaaatgcacagggaaaataccctctgcaagggtttcaatactccatgaagtcagacctgttacatctgggtgctttcctataatgcacgatagaacaaaaattagacagctgcctaaccttctccgaggatacgaacatgtcaggttatcaactcacaacgttatcaatgcaaaagatgcaccaggaagaccctacgaaattggaacctcagggtcttgccctaacattaccaatggaaacggattcttcgcaacaatggcttgggccgtcccaaaaaacaaaacagcaacaaatccattaacaatagaagtaccatacatttgtacagaaggagaagaccaaattaccgtttgggggttccactctgacaacgagacccaaatggcaaagctctatggggactcaaagccccagaagttcacctcatctgccaacggagtgaccacacattacgtttcacagattggtggcttcccaaatcaaacagaagacggaggactaccacaaagtggcagaattgttgttgattacatggtgcagaaatctggaaaaacaggaacaattacctatcaaagaggtattttattgcctcaaaaagtgtggtgcgcaagtggcaggagcaaggtaataaaaggatccttgcccttaattggagaagcagattgcctccatgaaaaatacggtggattaaacaaaagcaagccttactacacaggggaacatgcaaaggccataggaaattgcccaatatgggtgaaaacacccttgaagctggccaatggaaccaaatatagaccccctgcaaaactattaaaggaaagaggtttcttcggagccattgctggtttcttagagggaggatgggaaggaatgattgcaggttggcacggatacacatcccatggggcacatggagtagcggtggcagctgaccttaagagcactcaagaggccataaacaagataacaaaaaatctcaactctttgagtgagctggaagtaaagaatcttcaaagactaagcggtgccatggatgaactccacaacgaaatactagaactagatgagaaagtggatgatctcagagctgacacaataagctcacaaatagaactcgcagtcctgctttccaatgaaggaataataaacagtgaagatgaacatctcttggcgcttgaaagaaagctgaagaaaatgctgggcccctctgctgtagagatagggaatggatgctttgaaaccaaacacaagtgcaaccagacctgcctcgacagaatagctgctggtacctttgatgcaggagaattttctctccccacctttgattcactgaatattactgctgcatctttaaatgacgacggattggacaatcatactatactgctttactactcaactgctgcctccagtttggctgtaacactgatgatagctatctttgttgtttatatggtctccagagacaatgtttcttgctccatttgtctataaggaaagttaagccctgtattttcctttattgtagtgcttgtttgcttgttgtcattacaaagaaacgttattgaaaaatggaagcggagccacgaacttctctctgttaaagcaagcaggagatgttgaagaaaaccccgggcctttcggagctattgctggtttcttggaaggaggatgggaaggaatgattgcaggttggcacggatacacatctcatggagcacatggagtagcagtggcagcagaccttaagagtacccatgatga

SEQ ID NO: 415 - DNA, 9324 bp, synthetic construct
  source 1..9324: mol_type = other DNA; note = Hybrid Vaccine Candidate 27
atgttcgtgttcctggtgctgctgcccctggtgagcagccagtgcgtgaacctgatcaccaggacccagagctacaccaacagcttcaccaggggcgtgtactaccccgacaaggtgttcaggagcagcgtgctgcacagcacccaggacctgttcctgcccttcttcagcaacgtgacctggttccacgccatccacgtgagcggcaccaacggcaccaagaggttcgacaaccccgtgctgcccttcaacgacggcgtgtacttcgccagcaccgagaagagcaacatcatcaggggctggatcttcggcaccaccctggacagcaagacccagagcctgctgatcgtgaacaacgccaccaacgtggtgatcaaggtgtgcgagttccagttctgcaacgaccccttcctggacgtgtactaccacaagaacaacaagagctggatggagagcgagttcagggtgtacagcagcgccaacaactgcaccttcgagtacgtgagccagcccttcctgatggacctggagggcaagcagggcaacttcaagaacctgagggagttcgtgttcaagaacatcgacggctacttcaagatctacagcaagcacacccccatcaacctgggcagggacctgccccagggcttcagcgccctggagcccctggtggacctgcccatcggcatcaacatcaccaggttccagaccctgctggccctgcacaggagctacctgacccccggcgacagcagcagcggctggaccgccggcgccgccgcctactacgtgggctacctgcagcccaggaccttcctgctgaagtacaacgagaacggcaccatcaccgacgccgtggactgcgccctggaccccctgagcgagaccaagtgcaccctgaagagcttcaccgtggagaagggcatctaccagaccagcaacttcagggtgcagcccaccgagagcatcgtgaggttccccaacatcaccaacctgtgccccttcgacgaggtgttcaacgccaccaggttcgccagcgtgtacgcctggaacaggaagaggatcagcaactgcgtggccgactacagcgtgctgtacaacttcgcccccttcttcgccttcaagtgctacggcgtgagccccaccaagctgaacgacctgtgcttcaccaacgtgtacgccgacagcttcgtgatcaggggcaacgaggtgagccagatcgcccccggccagaccggcaacatcgccgactacaactacaagctgcccgacgacttcaccggctgcgtgatcgcctggaacagcaacaagctggacagcaaggtgggcggcaactacaactacctgtacaggctgttcaggaagagcaacctgaagcccttcgagagggacatcagcaccgagatctaccaggccggcaacaagccctgcaacggcgtggccggcttcaactgctacttccccctgaggagctacggcttcaggcccacctacggcgtgggccaccagccctacagggtggtggtgctgagcttcgagctgctgcacgcccccgccaccgtgtgcggccccaagaagagcaccaacctggtgaagaacaagtgcgtgaacttcaacttcaacggcctgaccggcaccggcgtgctgaccgagagcaacaagaagttcctgcccttccagcagttcggcagggacatcgccgacaccaccgacgccgtgagggacccccagaccctggagatcctggacatcaccccctgcagcttcggcggcgtgagcgtgatcacccccggcaccaacaccagcaaccaggtggccgtgctgtaccagggcgtgaactgcaccgaggtgcccgtggccatccacgccgaccagctgacccccacctggagggtgtacagcaccggcagcaacgtgttccagaccagggccggctgcctgatcggcgccgagtacgtgaacaacagctacgagtgcgacatccccatcggcgccggcatctgcgccagctaccagacccagaccaagagccaccagcaggcccagagcgtggccagccagagcatcatcgcctacaccatgagcctgggcgccgagaacagcgtggcctacagcaacaacagcatcgccatccccaccaacttcaccatcagcgtgaccaccgagatcctgcccgtgagcatgaccaagaccagcgtggactgcaccatgtacatctgcggcgacagcaccgagtgcagcaacctgctgctgcagtacggcagcttctgcacccagctgaagagggccctgaccggcatcgccgtggagcaggacaagaacacccaggaggtgttcgcccaggtgaagcagatctacaagaccccccccatcaagtacttcggcggcttcaacttcagccagatcctgcccgaccccagcaagcccagcaagaggagccccatcgaggacctgctgttcaacaaggtgaccctggccgacgccggcttcatcaagcagtacggcgactgcctgggcgacatcgccgccagggacctgatctgcgcccagaagttcaacggcctgaccgtgctgccccccctgctgaccgacgagatgatcgcccagtacaccagcgccctgctggccggcaccatcaccagcggctggaccttcggcgccggccccgccctgcagatccccttccccatgcagatggcctacaggttcaacggcatcggcgtgacccagaacgtgctgtacgagaaccagaagctgatcgccaaccagttcaacagcgccatcggcaagatccaggacagcctgagcagcacccccagcgccctgggcaagctgcaggacgtggtgaaccacaacgcccaggccctgaacaccctggtgaagcagctgagcagcaagttcggcgccatcagcagcgtgctgaacgacatcctgagcaggctggacccccccgaggccgaggtgcagatcgacaggctgatcaccggcaggctgcagagcctgcagacctacgtgacccagcagctgatcagggccgccgagatcagggccagcgccaacctggccgccaccaagatgagcgagtgcgtgctgggccagagcaagagggtggacttctgcggcaagggctaccacctgatgagcttcccccagagcgccccccacggcgtggtgttcctgcacgtgacctacgtgcccgcccaggagaagaacttcaccaccgcccccgccatctgccacgacggcaaggcccacttccccagggagggcgtgttcgtgagcaacggcacccactggttcgtgacccagaggaacttctacgagccccagatcatcaccaccgacaacaccttcgtgagcggcaactgcgacgtggtgatcggcatcgtgaacaacaccgtgtacgaccccctgcagcccgagctggacagcttcaaggaggagctggacaagtacttcaagaaccacaccagccccgacgtggacctgggcgacatcagcggcatcaacgccagcgtggtgaacatccagaaggagatcgacaggctgaacgaggtggccaagaacctgaacgagagcctgatcgacctgcaggagctgggcaagtacgagcagtacatcaagtggccctggtacatctggctgggcttcatcgccggcctgatcgccatcgtgatggtgaccatcatgctgtgctgcatgaccagctgctgcagctgcctgaagggctgctgcagctgcggcagctgctgcaagttcgacgaggacgacagcgagcccgtgctgaagggcgtgaagctgcactacaccggaagcggagccacgaacttctctctgttaaagcaagcaggagatgttgaagaaaaccccgggcctatgaaggcaatactagtagttctgctatatacatttgcaaccgcaaatgcagacacattatgtataggttatcatgcgaacaactcaacagacactgtagacacagtactagaaaagaatgtaacagtaacacactctgttaaccttctagaagacaagcataacgggaaactatgcaaactaagaggggtagccccattgcatttgggtaaatgtaacattgctggctggatcctgggaaatccagagtgtgaatcactctccacagcaagctcatggtcctacattgtggaaacatctagttcagacaatggaacgtgttacccaggagatttcatcgattatgaggagctaagagagcaattgagctcagtgtcatcatttgaaaggtttgagatattccccaagacaagttcatggcccaatcatgactcgaacaaaggtgtaacgacagcatgtcctcatgctggagcaaaaagcttctacaaaaatttaatatggctagttaaaaaaggaaattcatacccaaagctcagcaaatcctacattaatgataaagggaaagaagtcctcgtgctatggggcattcaccatccacctactagtgctgaccaacaaagtctctatcagaatgcagatgcatatgtttttgtggggacatcaagatacagcaagaagttcaagccggaaatagcaataaggcccaaagtgagggatcaagaagggagaatgaactattactggacactagtagagccgggagacaaaataacattcgaagcaactggaaatctagtggtaccgagatatgcattcgcaatggaaagaaatgctggatctggtattatcatttcagatacaccagtccacgattgcaatacaacttgtcagacacccaagggtgctataaacaccagcctcccatttcagaacatacatccgatcacaattggaaaatgtccaaaatatgtaaaaagcacaaaattgagactggccacaggattgaggaatgtcccgtccattcaatctagaggcctatttggggccattgccggtttcattgaaggggggtggacagggatggtagatggatggtacggttatcaccatcaaaatgagcaggggtcaggatatgcagccgacctgaagagcacacagaatgccattgacgagattactaacaaagtaaactctgttattgaaaaaatgaatacacagttcacagcagtaggtaaagagttcaaccacctggaaaaaagaatagagaatttaaataaaaaagttgatgatggtttcctggacatttggacttacaatgccgaactgttggttctattggaaaatgaaagaactttggactaccacgattcaaaggtgaagaacttatatgaaaaggtaagaagccagttaaaaaacaatgccaaggaaattggaaacggctgctttgaattttaccacaaatgtgataacacgtgcatggaaagtgtcaaaaatgggacttatgactacccaaaatactcagaggaagcaaaattaaacagagaagaaatagatggggtaaagctggaatcaacaaggatttaccagattttggcgatctattcaaccgtcgccagttcattggtactggtagtctccctgggggcaatcagtttctggatgtgctctaatgggtctctacagtgtagaatatgtatttaaggaagcggagccacgaacttctctctgttaaagcaagcaggagatgttgaagaaaaccccgggcctagcaaaagcaggggataattctattaaccatgaagactatcattgctttgagctacattctatgtctggttttcgctcaaaaacttcctggaaatgacaatagcactgcaacgctgtgccttgggcaccatgcagtaccaaacggaacgatagtgaaaacaatcacgaatgaccaaattgaagttactaatgctactgagctggttcagaattcctcaataggtgaaatatgcgacagtcctcatcagatccttgatggagaaaactgcacactaatagatgctctattgggagaccctcagtgtgatggctttcaaaataagaaatgggacctttttgttgaacgaagcaaagcctacagcaactgttacccttatgatgtgccggattatgcctcccttaggtcactagttgcctcatccggcacactggagtttaacaatgaaagcttcaattgggctggagtcactcaaaacggaacaagttctgcttgcataaggggatctaatagtagtttctttagtagattaaattggttgacccacttaaacttcaagtacccagcattgaacgtgactatgccaaacaatgaacaatttgacaaattgtacatttggggggttcaccacccgggtacggacaaggaccaaatcttcctgtatgctcaatcatcaggaagaatcacagtatctaccaaaagaagccaacaagctgtaatcccgaatatcggatctagacccagaataaggaatatccctagcagaataagcatctattggacaatagtaaaaccgggagacatacttttgattaacagcacagggaatctaattgctcctaggggttacttcaaaatacgaagtgggaaaagctcaataatgagatcagatgcacccattggcaaatgcaagtctgaatgcatcactccaaatggaagcattcccaatgacaaaccattccaaaatgtaaacaggatcacatacggggcctgtcccagatatgttaagcaaagcactctgaaattggcaacaggaatgcgaaatgtaccagagaaacaaactagaggcatatttggcgcaatagcgggtttcatagaaaatggttgggagggaatggtggatggttggtacggtttcaggcatcaaaattctgagggaagaggacaagcagcagatctcaaaagcactcaagcagcaatcgatcaaatcaatgggaagctgaatcgattgatcgggaaaaccaacgagaaattccatcagattgagaaagaattctcagaagtagaagggagaattcaggaccttgagaaatatgttgaggacacaaaaatagatctctggtcatacaacgcagagcttcttgttgccctggaaaaccaacatacaattgatctaactgactcagaaatgaacaaactgtttgaaaaaacaaagaagcaactgagggaaaatgctgaggatatgggcaatggttgtttcaaaatataccacaaatgtgacaatgcctgcataggatcaatcagaaatggaacttatgaccacgatgtatacagggatgaagcattaaacaaccggttccagatcaagggagttgagctgaagtcagggtacaaagattggatcctatggatttcctttgccatatcatgttttttgctttgtgttgctttgttggggttcatcatgtgggcctgccaaaagggcaacattaggtgcaacatttgcatttgagtgcattaattaaaaacacccttgtttctactggaagcggagccacgaacttctctctgttaaagcaagcaggagatgttgaagaaaaccccgggcctattttctaatatccacaaaatgaaggcaataattgtactactcatggtagtaacatccaatgcagatcgaatctgcactgggataacatcgtcaaactcaccacatgtcgtcaaaactgctactcaaggggaggtcaacgtgaccggtgtaataccactgacaacaacacccaccaaatctcattttgcaaatctcaaaggaacagaaaccagggggaaactatgcccaaaatgcctcaactgcacagatctggatgtagccttgggcagaccaaaatgcacagggaaaataccctctgcaagggtttcaatactccatgaagtcagacctgttacatctgggtgctttcctataatgcacgatagaacaaaaattagacagctgcctaaccttctccgaggatacgaacatgtcaggttatcaactcacaacgttatcaatgcaaaagatgcaccaggaagaccctacgaaattggaacctcagggtcttgccctaacattaccaatggaaacggattcttcgcaacaatggcttgggccgtcccaaaaaacaaaacagcaacaaatccattaacaatagaagtaccatacatttgtacagaaggagaagaccaaattaccgtttgggggttccactctgacaacgagacccaaatggcaaagctctatggggactcaaagccccagaagttcacctcatctgccaacggagtgaccacacattacgtttcacagattggtggcttcccaaatcaaacagaagacggaggactaccacaaagtggcagaattgttgttgattacatggtgcagaaatctggaaaaacaggaacaattacctatcaaagaggtattttattgcctcaaaaagtgtggtgcgcaagtggcaggagcaaggtaataaaaggatccttgcccttaattggagaagcagattgcctccatgaaaaatacggtggattaaacaaaagcaagccttactacacaggggaacatgcaaaggccataggaaattgcccaatatgggtgaaaacacccttgaagctggccaatggaaccaaatatagaccccctgcaaaactattaaaggaaagaggtttcttcggagccattgctggtttcttagagggaggatgggaaggaatgattgcaggttggcacggatacacatcccatggggcacatggagtagcggtggcagctgaccttaagagcactcaagaggccataaacaagataacaaaaaatctcaactctttgagtgagctggaagtaaagaatcttcaaagactaagcggtgccatggatgaactccacaacgaaatactagaactagatgagaaagtggatgatctcagagctgacacaataagctcacaaatagaactcgcagtcctgctttccaatgaaggaataataaacagtgaagatgaacatctcttggcgcttgaaagaaagctgaagaaaatgctgggcccctctgctgtagagatagggaatggatgctttgaaaccaaacacaagtgcaaccagacctgcctcgacagaatagctgctggtacctttgatgcaggagaattttctctccccacctttgattcactgaatattactgctgcatctttaaatgacgacggattggacaatcatactatactgctttactactcaactgctgcctccagtttggctgtaacactgatgatagctatctttgttgtttatatggtctccagagacaatgtttcttgctccatttgtctataaggaaagttaagccctgtattttcctttattgtagtgcttgtttgcttgttgtcattacaaagaaacgttattgaaaaattgatga

SEQ ID NO: 416 - DNA, 9324 bp, synthetic construct
  source 1..9324: mol_type = other DNA; note = Hybrid Vaccine Candidate 28
atgttcgtgttcctggtgctgctgcccctggtgagcagccagtgcgtgaacctgatcaccaggacccagagctacaccaacagcttcaccaggggcgtgtactaccccgacaaggtgttcaggagcagcgtgctgcacagcacccaggacctgttcctgcccttcttcagcaacgtgacctggttccacgccatccacgtgagcggcaccaacggcaccaagaggttcgacaaccccgtgctgcccttcaacgacggcgtgtacttcgccagcaccgagaagagcaacatcatcaggggctggatcttcggcaccaccctggacagcaagacccagagcctgctgatcgtgaacaacgccaccaacgtggtgatcaaggtgtgcgagttccagttctgcaacgaccccttcctggacgtgtactaccacaagaacaacaagagctggatggagagcgagttcagggtgtacagcagcgccaacaactgcaccttcgagtacgtgagccagcccttcctgatggacctggagggcaagcagggcaacttcaagaacctgagggagttcgtgttcaagaacatcgacggctacttcaagatctacagcaagcacacccccatcaacctgggcagggacctgccccagggcttcagcgccctggagcccctggtggacctgcccatcggcatcaacatcaccaggttccagaccctgctggccctgcacaggagctacctgacccccggcgacagcagcagcggctggaccgccggcgccgccgcctactacgtgggctacctgcagcccaggaccttcctgctgaagtacaacgagaacggcaccatcaccgacgccgtggactgcgccctggaccccctgagcgagaccaagtgcaccctgaagagcttcaccgtggagaagggcatctaccagaccagcaacttcagggtgcagcccaccgagagcatcgtgaggttccccaacatcaccaacctgtgccccttcgacgaggtgttcaacgccaccaggttcgccagcgtgtacgcctggaacaggaagaggatcagcaactgcgtggccgactacagcgtgctgtacaacttcgcccccttcttcgccttcaagtgctacggcgtgagccccaccaagctgaacgacctgtgcttcaccaacgtgtacgccgacagcttcgtgatcaggggcaacgaggtgagccagatcgcccccggccagaccggcaacatcgccgactacaactacaagctgcccgacgacttcaccggctgcgtgatcgcctggaacagcaacaagctggacagcaaggtgggcggcaactacaactacctgtacaggctgttcaggaagagcaacctgaagcccttcgagagggacatcagcaccgagatctaccaggccggcaacaagccctgcaacggcgtggccggcttcaactgctacttccccctgaggagctacggcttcaggcccacctacggcgtgggccaccagccctacagggtggtggtgctgagcttcgagctgctgcacgcccccgccaccgtgtgcggccccaagaagagcaccaacctggtgaagaacaagtgcgtgaacttcaacttcaacggcctgaccggcaccggcgtgctgaccgagagcaacaagaagttcctgcccttccagcagttcggcagggacatcgccgacaccaccgacgccgtgagggacccccagaccctggagatcctggacatcaccccctgcagcttcggcggcgtgagcgtgatcacccccggcaccaacaccagcaaccaggtggccgtgctgtaccagggcgtgaactgcaccgaggtgcccgtggccatccacgccgaccagctgacccccacctggagggtgtacagcaccggcagcaacgtgttccagaccagggccggctgcctgatcggcgccgagtacgtgaacaacagctacgagtgcgacatccccatcggcgccggcatctgcgccagctaccagacccagaccaagagccaccagcaggcccagagcgtggccagccagagcatcatcgcctacaccatgagcctgggcgccgagaacagcgtggcctacagcaacaacagcatcgccatccccaccaacttcaccatcagcgtgaccaccgagatcctgcccgtgagcatgaccaagaccagcgtggactgcaccatgtacatctgcggcgacagcaccgagtgcagcaacctgctgctgcagtacggcagcttctgcacccagctgaagagggccctgaccggcatcgccgtggagcaggacaagaacacccaggaggtgttcgcccaggtgaagcagatctacaagaccccccccatcaagtacttcggcggcttcaacttcagccagatcctgcccgaccccagcaagcccagcaagaggagcttcatcgaggacctgctgttcaacaaggtgaccctggccgacgccggcttcatcaagcagtacggcgactgcctgggcgacatcgccgccagggacctgatctgcgcccagaagttcaacggcctgaccgtgctgccccccctgctgaccgacgagatgatcgcccagtacaccagcgccctgctggccggcaccatcaccagcggctggaccttcggcgccggcgccgccctgcagatccccttcgccatgcagatggcctacaggttcaacggcatcggcgtgacccagaacgtgctgtacgagaaccagaagctgatcgccaaccagttcaacagcgccatcggcaagatccaggacagcctgagcagcaccgccagcgccctgggcaagctgcaggacgtggtgaaccacaacgcccaggccctgaacaccctggtgaagcagctgagcagcaagttcggcgccatcagcagcgtgctgaacgacatcctgagcaggctggacccccccgaggccgaggtgcagatcgacaggctgatcaccggcaggctgcagagcctgcagacctacgtgacccagcagctgatcagggccgccgagatcagggccagcgccaacctggccgccaccaagatgagcgagtgcgtgctgggccagagcaagagggtggacttctgcggcaagggctaccacctgatgagcttcccccagagcgccccccacggcgtggtgttcctgcacgtgacctacgtgcccgcccaggagaagaacttcaccaccgcccccgccatctgccacgacggcaaggcccacttccccagggagggcgtgttcgtgagcaacggcacccactggttcgtgacccagaggaacttctacgagccccagatcatcaccaccgacaacaccttcgtgagcggcaactgcgacgtggtgatcggcatcgtgaacaacaccgtgtacgaccccctgcagcccgagctggacagcttcaaggaggagctggacaagtacttcaagaaccacaccagccccgacgtggacctgggcgacatcagcggcatcaacgccagcgtggtgaacatccagaaggagatcgacaggctgaacgaggtggccaagaacctgaacgagagcctgatcgacctgcaggagctgggcaagtacgagcagtacatcaagtggccctggtacatctggctgggcttcatcgccggcctgatcgccatcgtgatggtgaccatcatgctgtgctgcatgaccagctgctgcagctgcctgaagggctgctgcagctgcggcagctgctgcaagttcgacgaggacgacagcgagcccgtgctgaagggcgtgaagctgcactacaccggaagcggagccacgaacttctctctgttaaagcaagcaggagatgttgaagaaaaccccgggcctatgaaggcaatactagtagttctgctatatacatttgcaaccgcaaatgcagacacattatgtataggttatcatgcgaacaactcaacagacactgtagacacagtactagaaaagaatgtaacagtaacacactctgttaaccttctagaagacaagcataacgggaaactatgcaaactaagaggggtagccccattgcatttgggtaaatgtaacattgctggctggatcctgggaaatccagagtgtgaatcactctccacagcaagctcatggtcctacattgtggaaacatctagttcagacaatggaacgtgttacccaggagatttcatcgattatgaggagctaagagagcaattgagctcagtgtcatcatttgaaaggtttgagatattccccaagacaagttcatggcccaatcatgactcgaacaaaggtgtaacgacagcatgtcctcatgctggagcaaaaagcttctacaaaaatttaatatggctagttaaaaaaggaaattcatacccaaagctcagcaaatcctacattaatgataaagggaaagaagtcctcgtgctatggggcattcaccatccacctactagtgctgaccaacaaagtctctatcagaatgcagatgcatatgtttttgtggggacatcaagatacagcaagaagttcaagccggaaatagcaataaggcccaaagtgagggatcaagaagggagaatgaactattactggacactagtagagccgggagacaaaataacattcgaagcaactggaaatctagtggtaccgagatatgcattcgcaatggaaagaaatgctggatctggtattatcatttcagatacaccagtccacgattgcaatacaacttgtcagacacccaagggtgctataaacaccagcctcccatttcagaacatacatccgatcacaattggaaaatgtccaaaatatgtaaaaagcacaaaattgagactggccacaggattgaggaatgtcccgtccattcaatctagaggcctatttggggccattgccggtttcattgaaggggggtggacagggatggtagatggatggtacggttatcaccatcaaaatgagcaggggtcaggatatgcagccgacctgaagagcacacagaatgccattgacgagattactaacaaagtaaactctgttattgaaaaaatgaatacacagttcacagcagtaggtaaagagttcaaccacctggaaaaaagaatagagaatttaaataaaaaagttgatgatggtttcctggacatttggacttacaatgccgaactgttggttctattggaaaatgaaagaactttggactaccacgattcaaaggtgaagaacttatatgaaaaggtaagaagccagttaaaaaacaatgccaaggaaattggaaacggctgctttgaattttaccacaaatgtgataacacgtgcatggaaagtgtcaaaaatgggacttatgactacccaaaatactcagaggaagcaaaattaaacagagaagaaatagatggggtaaagctggaatcaacaaggatttaccagattttggcgatctattcaaccgtcgccagttcattggtactggtagtctccctgggggcaatcagtttctggatgtgctctaatgggtctctacagtgtagaatatgtatttaaggaagcggagccacgaacttctctctgttaaagcaagcaggagatgttgaagaaaaccccgggcctagcaaaagcaggggataattctattaaccatgaagactatcattgctttgagctacattctatgtctggttttcgctcaaaaacttcctggaaatgacaatagcactgcaacgctgtgccttgggcaccatgcagtaccaaacggaacgatagtgaaaacaatcacgaatgaccaaattgaagttactaatgctactgagctggttcagaattcctcaataggtgaaatatgcgacagtcctcatcagatccttgatggagaaaactgcacactaatagatgctctattgggagaccctcagtgtgatggctttcaaaataagaaatgggacctttttgttgaacgaagcaaagcctacagcaactgttacccttatgatgtgccggattatgcctcccttaggtcactagttgcctcatccggcacactggagtttaacaatgaaagcttcaattgggctggagtcactcaaaacggaacaagttctgcttgcataaggggatctaatagtagtttctttagtagattaaattggttgacccacttaaacttcaagtacccagcattgaacgtgactatgccaaacaatgaacaatttgacaaattgtacatttggggggttcaccacccgggtacggacaaggaccaaatcttcctgtatgctcaatcatcaggaagaatcacagtatctaccaaaagaagccaacaagctgtaatcccgaatatcggatctagacccagaataaggaatatccctagcagaataagcatctattggacaatagtaaaaccgggagacatacttttgattaacagcacagggaatctaattgctcctaggggttacttcaaaatacgaagtgggaaaagctcaataatgagatcagatgcacccattggcaaatgcaagtctgaatgcatcactccaaatggaagcattcccaatgacaaaccattccaaaatgtaaacaggatcacatacggggcctgtcccagatatgttaagcaaagcactctgaaattggcaacaggaatgcgaaatgtaccagagaaacaaactagaggcatatttggcgcaatagcgggtttcatagaaaatggttgggagggaatggtggatggttggtacggtttcaggcatcaaaattctgagggaagaggacaagcagcagatctcaaaagcactcaagcagcaatcgatcaaatcaatgggaagctgaatcgattgatcgggaaaaccaacgagaaattccatcagattgagaaagaattctcagaagtagaagggagaattcaggaccttgagaaatatgttgaggacacaaaaatagatctctggtcatacaacgcagagcttcttgttgccctggaaaaccaacatacaattgatctaactgactcagaaatgaacaaactgtttgaaaaaacaaagaagcaactgagggaaaatgctgaggatatgggcaatggttgtttcaaaatataccacaaatgtgacaatgcctgcataggatcaatcagaaatggaacttatgaccacgatgtatacagggatgaagcattaaacaaccggttccagatcaagggagttgagctgaagtcagggtacaaagattggatcctatggatttcctttgccatatcatgttttttgctttgtgttgctttgttggggttcatcatgtgggcctgccaaaagggcaacattaggtgcaacatttgcatttgagtgcattaattaaaaacacccttgtttctactggaagcggagccacgaacttctctctgttaaagcaagcaggagatgttgaagaaaaccccgggcctattttctaatatccacaaaatgaaggcaataattgtactactcatggtagtaacatccaatgcagatcgaatctgcactgggataacatcgtcaaactcaccacatgtcgtcaaaactgctactcaaggggaggtcaacgtgaccggtgtaataccactgacaacaacacccaccaaatctcattttgcaaatctcaaaggaacagaaaccagggggaaactatgcccaaaatgcctcaactgcacagatctggatgtagccttgggcagaccaaaatgcacagggaaaataccctctgcaagggtttcaatactccatgaagtcagacctgttacatctgggtgctttcctataatgcacgatagaacaaaaattagacagctgcctaaccttctccgaggatacgaacatgtcaggttatcaactcacaacgttatcaatgcaaaagatgcaccaggaagaccctacgaaattggaacctcagggtcttgccctaacattaccaatggaaacggattcttcgcaacaatggcttgggccgtcccaaaaaacaaaacagcaacaaatccattaacaatagaagtaccatacatttgtacagaaggagaagaccaaattaccgtttgggggttccactctgacaacgagacccaaatggcaaagctctatggggactcaaagccccagaagttcacctcatctgccaacggagtgaccacacattacgtttcacagattggtggcttcccaaatcaaacagaagacggaggactaccacaaagtggcagaattgttgttgattacatggtgcagaaatctggaaaaacaggaacaattacctatcaaagaggtattttattgcctcaaaaagtgtggtgcgcaagtggcaggagcaaggtaataaaaggatccttgcccttaattggagaagcagattgcctccatgaaaaatacggtggattaaacaaaagcaagccttactacacaggggaacatgcaaaggccataggaaattgcccaatatgggtgaaaacacccttgaagctggccaatggaaccaaatatagaccccctgcaaaactattaaaggaaagaggtttcttcggagccattgctggtttcttagagggaggatgggaaggaatgattgcaggttggcacggatacacatcccatggggcacatggagtagcggtggcagctgaccttaagagcactcaagaggccataaacaagataacaaaaaatctcaactctttgagtgagctggaagtaaagaatcttcaaagactaagcggtgccatggatgaactccacaacgaaatactagaactagatgagaaagtggatgatctcagagctgacacaataagctcacaaatagaactcgcagtcctgctttccaatgaaggaataataaacagtgaagatgaacatctcttggcgcttgaaagaaagctgaagaaaatgctgggcccctctgctgtagagatagggaatggatgctttgaaaccaaacacaagtgcaaccagacctgcctcgacagaatagctgctggtacctttgatgcaggagaattttctctccccacctttgattcactgaatattactgctgcatctttaaatgacgacggattggacaatcatactatactgctttactactcaactgctgcctccagtttggctgtaacactgatgatagctatctttgttgtttatatggtctccagagacaatgtttcttgctccatttgtctataaggaaagttaagccctgtattttcctttattgtagtgcttgtttgcttgttgtcattacaaagaaacgttattgaaaaattgatga

SEQ ID NO: 417 - DNA, 9333 bp, synthetic construct
  source 1..9333: mol_type = other DNA; note = Hybrid Vaccine Candidate 29
atgttcgtgttcctggtgctgctgcccctggtgagcagccagtgcgtgaacctgaccaccaggacccagctgccccccgcctacaccaacagcttcaccaggggcgtgtactaccccgacaaggtgttcaggagcagcgtgctgcacagcacccaggacctgttcctgcccttcttcagcaacgtgacctggttccacgccatccacgtgagcggcaccaacggcaccaagaggttcgacaaccccgtgctgcccttcaacgacggcgtgtacttcgccagcaccgagaagagcaacatcatcaggggctggatcttcggcaccaccctggacagcaagacccagagcctgctgatcgtgaacaacgccaccaacgtggtgatcaaggtgtgcgagttccagttctgcaacgaccccttcctgggcgtgtactaccacaagaacaacaagagctggatggagagcgagttcagggtgtacagcagcgccaacaactgcaccttcgagtacgtgagccagcccttcctgatggacctggagggcaagcagggcaacttcaagaacctgagggagttcgtgttcaagaacatcgacggctacttcaagatctacagcaagcacacccccatcaacctggtgagggacctgccccagggcttcagcgccctggagcccctggtggacctgcccatcggcatcaacatcaccaggttccagaccctgctggccctgcacaggagctacctgacccccggcgacagcagcagcggctggaccgccggcgccgccgcctactacgtgggctacctgcagcccaggaccttcctgctgaagtacaacgagaacggcaccatcaccgacgccgtggactgcgccctggaccccctgagcgagaccaagtgcaccctgaagagcttcaccgtggagaagggcatctaccagaccagcaacttcagggtgcagcccaccgagagcatcgtgaggttccccaacatcaccaacctgtgccccttcggcgaggtgttcaacgccaccaggttcgccagcgtgtacgcctggaacaggaagaggatcagcaactgcgtggccgactacagcgtgctgtacaacagcgccagcttcagcaccttcaagtgctacggcgtgagccccaccaagctgaacgacctgtgcttcaccaacgtgtacgccgacagcttcgtgatcaggggcgacgaggtgaggcagatcgcccccggccagaccggcaagatcgccgactacaactacaagctgcccgacgacttcaccggctgcgtgatcgcctggaacagcaacaacctggacagcaaggtgggcggcaactacaactacctgtacaggctgttcaggaagagcaacctgaagcccttcgagagggacatcagcaccgagatctaccaggccggcagcaccccctgcaacggcgtggagggcttcaactgctacttccccctgcagagctacggcttccagcccaccaacggcgtgggctaccagccctacagggtggtggtgctgagcttcgagctgctgcacgcccccgccaccgtgtgcggccccaagaagagcaccaacctggtgaagaacaagtgcgtgaacttcaacttcaacggcctgaccggcaccggcgtgctgaccgagagcaacaagaagttcctgcccttccagcagttcggcagggacatcgccgacaccaccgacgccgtgagggacccccagaccctggagatcctggacatcaccccctgcagcttcggcggcgtgagcgtgatcacccccggcaccaacaccagcaaccaggtggccgtgctgtaccaggacgtgaactgcaccgaggtgcccgtggccatccacgccgaccagctgacccccacctggagggtgtacagcaccggcagcaacgtgttccagaccagggccggctgcctgatcggcgccgagcacgtgaacaacagctacgagtgcgacatccccatcggcgccggcatctgcgccagctaccagacccagaccaacagccccggcagcgccagcagcgtggccagccagagcatcatcgcctacaccatgagcctgggcgccgagaacagcgtggcctacagcaacaacagcatcgccatccccaccaacttcaccatcagcgtgaccaccgagatcctgcccgtgagcatgaccaagaccagcgtggactgcaccatgtacatctgcggcgacagcaccgagtgcagcaacctgctgctgcagtacggcagcttctgcacccagctgaacagggccctgaccggcatcgccgtggagcaggacaagaacacccaggaggtgttcgcccaggtgaagcagatctacaagaccccccccatcaaggacttcggcggcttcaacttcagccagatcctgcccgaccccagcaagcccagcaagaggagccccatcgaggacctgctgttcaacaaggtgaccctggccgacgccggcttcatcaagcagtacggcgactgcctgggcgacatcgccgccagggacctgatctgcgcccagaagttcaacggcctgaccgtgctgccccccctgctgaccgacgagatgatcgcccagtacaccagcgccctgctggccggcaccatcaccagcggctggaccttcggcgccggccccgccctgcagatccccttccccatgcagatggcctacaggttcaacggcatcggcgtgacccagaacgtgctgtacgagaaccagaagctgatcgccaaccagttcaacagcgccatcggcaagatccaggacagcctgagcagcacccccagcgccctgggcaagctgcaggacgtggtgaaccagaacgcccaggccctgaacaccctggtgaagcagctgagcagcaacttcggcgccatcagcagcgtgctgaacgacatcctgagcaggctggacccccccgaggccgaggtgcagatcgacaggctgatcaccggcaggctgcagagcctgcagacctacgtgacccagcagctgatcagggccgccgagatcagggccagcgccaacctggccgccaccaagatgagcgagtgcgtgctgggccagagcaagagggtggacttctgcggcaagggctaccacctgatgagcttcccccagagcgccccccacggcgtggtgttcctgcacgtgacctacgtgcccgcccaggagaagaacttcaccaccgcccccgccatctgccacgacggcaaggcccacttccccagggagggcgtgttcgtgagcaacggcacccactggttcgtgacccagaggaacttctacgagccccagatcatcaccaccgacaacaccttcgtgagcggcaactgcgacgtggtgatcggcatcgtgaacaacaccgtgtacgaccccctgcagcccgagctggacagcttcaaggaggagctggacaagtacttcaagaaccacaccagccccgacgtggacctgggcgacatcagcggcatcaacgccagcgtggtgaacatccagaaggagatcgacaggctgaacgaggtggccaagaacctgaacgagagcctgatcgacctgcaggagctgggcaagtacgagcagtacatcaagtggccctggtacatctggctgggcttcatcgccggcctgatcgccatcgtgatggtgaccatcatgctgtgctgcatgaccagctgctgcagctgcctgaagggctgctgcagctgcggcagctgctgcaagttcgacgaggacgacagcgagcccgtgctgaagggcgtgaagctgcactacaccggaagcggagccacgaacttctctctgttaaagcaagcaggagatgttgaagaaaaccccgggcctatgaaggcaatactagtagttctgctatatacatttgcaaccgcaaatgcagacacattatgtataggttatcatgcgaacaactcaacagacactgtagacacagtactagaaaagaatgtaacagtaacacactctgttaaccttctagaagacaagcataacgggaaactatgcaaactaagaggggtagccccattgcatttgggtaaatgtaacattgctggctggatcctgggaaatccagagtgtgaatcactctccacagcaagctcatggtcctacattgtggaaacatctagttcagacaatggaacgtgttacccaggagatttcatcgattatgaggagctaagagagcaattgagctcagtgtcatcatttgaaaggtttgagatattccccaagacaagttcatggcccaatcatgactcgaacaaaggtgtaacgacagcatgtcctcatgctggagcaaaaagcttctacaaaaatttaatatggctagttaaaaaaggaaattcatacccaaagctcagcaaatcctacattaatgataaagggaaagaagtcctcgtgctatggggcattcaccatccacctactagtgctgaccaacaaagtctctatcagaatgcagatgcatatgtttttgtggggacatcaagatacagcaagaagttcaagccggaaatagcaataaggcccaaagtgagggatcaagaagggagaatgaactattactggacactagtagagccgggagacaaaataacattcgaagcaactggaaatctagtggtaccgagatatgcattcgcaatggaaagaaatgctggatctggtattatcatttcagatacaccagtccacgattgcaatacaacttgtcagacacccaagggtgctataaacaccagcctcccatttcagaacatacatccgatcacaattggaaaatgtccaaaatatgtaaaaagcacaaaattgagactggccacaggattgaggaatgtcccgtccattcaatctagaggcctatttggggccattgccggtttcattgaaggggggtggacagggatggtagatggatggtacggttatcaccatcaaaatgagcaggggtcaggatatgcagccgacctgaagagcacacagaatgccattgacgagattactaacaaagtaaactctgttattgaaaaaatgaatacacagttcacagcagtaggtaaagagttcaaccacctggaaaaaagaatagagaatttaaataaaaaagttgatgatggtttcctggacatttggacttacaatgccgaactgttggttctattggaaaatgaaagaactttggactaccacgattcaaaggtgaagaacttatatgaaaaggtaagaagccagttaaaaaacaatgccaaggaaattggaaacggctgctttgaattttaccacaaatgtgataacacgtgcatggaaagtgtcaaaaatgggacttatgactacccaaaatactcagaggaagcaaaattaaacagagaagaaatagatggggtaaagctggaatcaacaaggatttaccagattttggcgatctattcaaccgtcgccagttcattggtactggtagtctccctgggggcaatcagtttctggatgtgctctaatgggtctctacagtgtagaatatgtatttaaggaagcggagccacgaacttctctctgttaaagcaagcaggagatgttgaagaaaaccccgggcctagcaaaagcaggggataattctattaaccatgaagactatcattgctttgagctacattctatgtctggttttcgctcaaaaacttcctggaaatgacaatagcactgcaacgctgtgccttgggcaccatgcagtaccaaacggaacgatagtgaaaacaatcacgaatgaccaaattgaagttactaatgctactgagctggttcagaattcctcaataggtgaaatatgcgacagtcctcatcagatccttgatggagaaaactgcacactaatagatgctctattgggagaccctcagtgtgatggctttcaaaataagaaatgggacctttttgttgaacgaagcaaagcctacagcaactgttacccttatgatgtgccggattatgcctcccttaggtcactagttgcctcatccggcacactggagtttaacaatgaaagcttcaattgggctggagtcactcaaaacggaacaagttctgcttgcataaggggatctaatagtagtttctttagtagattaaattggttgacccacttaaacttcaagtacccagcattgaacgtgactatgccaaacaatgaacaatttgacaaattgtacatttggggggttcaccacccgggtacggacaaggaccaaatcttcctgtatgctcaatcatcaggaagaatcacagtatctaccaaaagaagccaacaagctgtaatcccgaatatcggatctagacccagaataaggaatatccctagcagaataagcatctattggacaatagtaaaaccgggagacatacttttgattaacagcacagggaatctaattgctcctaggggttacttcaaaatacgaagtgggaaaagctcaataatgagatcagatgcacccattggcaaatgcaagtctgaatgcatcactccaaatggaagcattcccaatgacaaaccattccaaaatgtaaacaggatcacatacggggcctgtcccagatatgttaagcaaagcactctgaaattggcaacaggaatgcgaaatgtaccagagaaacaaactagaggcatatttggcgcaatagcgggtttcatagaaaatggttgggagggaatggtggatggttggtacggtttcaggcatcaaaattctgagggaagaggacaagcagcagatctcaaaagcactcaagcagcaatcgatcaaatcaatgggaagctgaatcgattgatcgggaaaaccaacgagaaattccatcagattgagaaagaattctcagaagtagaagggagaattcaggaccttgagaaatatgttgaggacacaaaaatagatctctggtcatacaacgcagagcttcttgttgccctggaaaaccaacatacaattgatctaactgactcagaaatgaacaaactgtttgaaaaaacaaagaagcaactgagggaaaatgctgaggatatgggcaatggttgtttcaaaatataccacaaatgtgacaatgcctgcataggatcaatcagaaatggaacttatgaccacgatgtatacagggatgaagcattaaacaaccggttccagatcaagggagttgagctgaagtcagggtacaaagattggatcctatggatttcctttgccatatcatgttttttgctttgtgttgctttgttggggttcatcatgtgggcctgccaaaagggcaacattaggtgcaacatttgcatttgagtgcattaattaaaaacacccttgtttctactggaagcggagccacgaacttctctctgttaaagcaagcaggagatgttgaagaaaaccccgggcctattttctaatatccacaaaatgaaggcaataattgtactactcatggtagtaacatccaatgcagatcgaatctgcactgggataacatcgtcaaactcaccacatgtcgtcaaaactgctactcaaggggaggtcaacgtgaccggtgtaataccactgacaacaacacccaccaaatctcattttgcaaatctcaaaggaacagaaaccagggggaaactatgcccaaaatgcctcaactgcacagatctggatgtagccttgggcagaccaaaatgcacagggaaaataccctctgcaagggtttcaatactccatgaagtcagacctgttacatctgggtgctttcctataatgcacgatagaacaaaaattagacagctgcctaaccttctccgaggatacgaacatgtcaggttatcaactcacaacgttatcaatgcaaaagatgcaccaggaagaccctacgaaattggaacctcagggtcttgccctaacattaccaatggaaacggattcttcgcaacaatggcttgggccgtcccaaaaaacaaaacagcaacaaatccattaacaatagaagtaccatacatttgtacagaaggagaagaccaaattaccgtttgggggttccactctgacaacgagacccaaatggcaaagctctatggggactcaaagccccagaagttcacctcatctgccaacggagtgaccacacattacgtttcacagattggtggcttcccaaatcaaacagaagacggaggactaccacaaagtggcagaattgttgttgattacatggtgcagaaatctggaaaaacaggaacaattacctatcaaagaggtattttattgcctcaaaaagtgtggtgcgcaagtggcaggagcaaggtaataaaaggatccttgcccttaattggagaagcagattgcctccatgaaaaatacggtggattaaacaaaagcaagccttactacacaggggaacatgcaaaggccataggaaattgcccaatatgggtgaaaacacccttgaagctggccaatggaaccaaatatagaccccctgcaaaactattaaaggaaagaggtttcttcggagccattgctggtttcttagagggaggatgggaaggaatgattgcaggttggcacggatacacatcccatggggcacatggagtagcggtggcagctgaccttaagagcactcaagaggccataaacaagataacaaaaaatctcaactctttgagtgagctggaagtaaagaatcttcaaagactaagcggtgccatggatgaactccacaacgaaatactagaactagatgagaaagtggatgatctcagagctgacacaataagctcacaaatagaactcgcagtcctgctttccaatgaaggaataataaacagtgaagatgaacatctcttggcgcttgaaagaaagctgaagaaaatgctgggcccctctgctgtagagatagggaatggatgctttgaaaccaaacacaagtgcaaccagacctgcctcgacagaatagctgctggtacctttgatgcaggagaattttctctccccacctttgattcactgaatattactgctgcatctttaaatgacgacggattggacaatcatactatactgctttactactcaactgctgcctccagtttggctgtaacactgatgatagctatctttgttgtttatatggtctccagagacaatgtttcttgctccatttgtctataaggaaagttaagccctgtattttcctttattgtagtgcttgtttgcttgttgtcattacaaagaaacgttattgaaaaattgatga

SEQ ID NO: 418 - DNA, 9333 bp, synthetic construct
  source 1..9333: mol_type = other DNA; note = Hybrid Vaccine Candidate 30
atgttcgtgttcctggtgctgctgcccctggtgagcagccagtgcgtgaacctgaccaccaggacccagctgccccccgcctacaccaacagcttcaccaggggcgtgtactaccccgacaaggtgttcaggagcagcgtgctgcacagcacccaggacctgttcctgcccttcttcagcaacgtgacctggttccacgccatccacgtgagcggcaccaacggcaccaagaggttcgacaaccccgtgctgcccttcaacgacggcgtgtacttcgccagcaccgagaagagcaacatcatcaggggctggatcttcggcaccaccctggacagcaagacccagagcctgctgatcgtgaacaacgccaccaacgtggtgatcaaggtgtgcgagttccagttctgcaacgaccccttcctgggcgtgtactaccacaagaacaacaagagctggatggagagcgagttcagggtgtacagcagcgccaacaactgcaccttcgagtacgtgagccagcccttcctgatggacctggagggcaagcagggcaacttcaagaacctgagggagttcgtgttcaagaacatcgacggctacttcaagatctacagcaagcacacccccatcaacctggtgagggacctgccccagggcttcagcgccctggagcccctggtggacctgcccatcggcatcaacatcaccaggttccagaccctgctggccctgcacaggagctacctgacccccggcgacagcagcagcggctggaccgccggcgccgccgcctactacgtgggctacctgcagcccaggaccttcctgctgaagtacaacgagaacggcaccatcaccgacgccgtggactgcgccctggaccccctgagcgagaccaagtgcaccctgaagagcttcaccgtggagaagggcatctaccagaccagcaacttcagggtgcagcccaccgagagcatcgtgaggttccccaacatcaccaacctgtgccccttcggcgaggtgttcaacgccaccaggttcgccagcgtgtacgcctggaacaggaagaggatcagcaactgcgtggccgactacagcgtgctgtacaacagcgccagcttcagcaccttcaagtgctacggcgtgagccccaccaagctgaacgacctgtgcttcaccaacgtgtacgccgacagcttcgtgatcaggggcgacgaggtgaggcagatcgcccccggccagaccggcaagatcgccgactacaactacaagctgcccgacgacttcaccggctgcgtgatcgcctggaacagcaacaacctggacagcaaggtgggcggcaactacaactacctgtacaggctgttcaggaagagcaacctgaagcccttcgagagggacatcagcaccgagatctaccaggccggcagcaccccctgcaacggcgtggagggcttcaactgctacttccccctgcagagctacggcttccagcccaccaacggcgtgggctaccagccctacagggtggtggtgctgagcttcgagctgctgcacgcccccgccaccgtgtgcggccccaagaagagcaccaacctggtgaagaacaagtgcgtgaacttcaacttcaacggcctgaccggcaccggcgtgctgaccgagagcaacaagaagttcctgcccttccagcagttcggcagggacatcgccgacaccaccgacgccgtgagggacccccagaccctggagatcctggacatcaccccctgcagcttcggcggcgtgagcgtgatcacccccggcaccaacaccagcaaccaggtggccgtgctgtaccaggacgtgaactgcaccgaggtgcccgtggccatccacgccgaccagctgacccccacctggagggtgtacagcaccggcagcaacgtgttccagaccagggccggctgcctgatcggcgccgagcacgtgaacaacagctacgagtgcgacatccccatcggcgccggcatctgcgccagctaccagacccagaccaacagccccaggagggccaggagcgtggccagccagagcatcatcgcctacaccatgagcctgggcgccgagaacagcgtggcctacagcaacaacagcatcgccatccccaccaacttcaccatcagcgtgaccaccgagatcctgcccgtgagcatgaccaagaccagcgtggactgcaccatgtacatctgcggcgacagcaccgagtgcagcaacctgctgctgcagtacggcagcttctgcacccagctgaacagggccctgaccggcatcgccgtggagcaggacaagaacacccaggaggtgttcgcccaggtgaagcagatctacaagaccccccccatcaaggacttcggcggcttcaacttcagccagatcctgcccgaccccagcaagcccagcaagaggagcttcatcgaggacctgctgttcaacaaggtgaccctggccgacgccggcttcatcaagcagtacggcgactgcctgggcgacatcgccgccagggacctgatctgcgcccagaagttcaacggcctgaccgtgctgccccccctgctgaccgacgagatgatcgcccagtacaccagcgccctgctggccggcaccatcaccagcggctggaccttcggcgccggcgccgccctgcagatccccttcgccatgcagatggcctacaggttcaacggcatcggcgtgacccagaacgtgctgtacgagaaccagaagctgatcgccaaccagttcaacagcgccatcggcaagatccaggacagcctgagcagcaccgccagcgccctgggcaagctgcaggacgtggtgaaccagaacgcccaggccctgaacaccctggtgaagcagctgagcagcaacttcggcgccatcagcagcgtgctgaacgacatcctgagcaggctggacccccccgaggccgaggtgcagatcgacaggctgatcaccggcaggctgcagagcctgcagacctacgtgacccagcagctgatcagggccgccgagatcagggccagcgccaacctggccgccaccaagatgagcgagtgcgtgctgggccagagcaagagggtggacttctgcggcaagggctaccacctgatgagcttcccccagagcgccccccacggcgtggtgttcctgcacgtgacctacgtgcccgcccaggagaagaacttcaccaccgcccccgccatctgccacgacggcaaggcccacttccccagggagggcgtgttcgtgagcaacggcacccactggttcgtgacccagaggaacttctacgagccccagatcatcaccaccgacaacaccttcgtgagcggcaactgcgacgtggtgatcggcatcgtgaacaacaccgtgtacgaccccctgcagcccgagctggacagcttcaaggaggagctggacaagtacttcaagaaccacaccagccccgacgtggacctgggcgacatcagcggcatcaacgccagcgtggtgaacatccagaaggagatcgacaggctgaacgaggtggccaagaacctgaacgagagcctgatcgacctgcaggagctgggcaagtacgagcagtacatcaagtggccctggtacatctggctgggcttcatcgccggcctgatcgccatcgtgatggtgaccatcatgctgtgctgcatgaccagctgctgcagctgcctgaagggctgctgcagctgcggcagctgctgcaagttcgacgaggacgacagcgagcccgtgctgaagggcgtgaagctgcactacaccggaagcggagccacgaacttctctctgttaaagcaagcaggagatgttgaagaaaaccccgggcctatgaaggcaatactagtagttctgctatatacatttgcaaccgcaaatgcagacacattatgtataggttatcatgcgaacaactcaacagacactgtagacacagtactagaaaagaatgtaacagtaacacactctgttaaccttctagaagacaagcataacgggaaactatgcaaactaagaggggtagccccattgcatttgggtaaatgtaacattgctggctggatcctgggaaatccagagtgtgaatcactctccacagcaagctcatggtcctacattgtggaaacatctagttcagacaatggaacgtgttacccaggagatttcatcgattatgaggagctaagagagcaattgagctcagtgtcatcatttgaaaggtttgagatattccccaagacaagttcatggcccaatcatgactcgaacaaaggtgtaacgacagcatgtcctcatgctggagcaaaaagcttctacaaaaatttaatatggctagttaaaaaaggaaattcatacccaaagctcagcaaatcctacattaatgataaagggaaagaagtcctcgtgctatggggcattcaccatccacctactagtgctgaccaacaaagtctctatcagaatgcagatgcatatgtttttgtggggacatcaagatacagcaagaagttcaagccggaaatagcaataaggcccaaagtgagggatcaagaagggagaatgaactattactggacactagtagagccgggagacaaaataacattcgaagcaactggaaatctagtggtaccgagatatgcattcgcaatggaaagaaatgctggatctggtattatcatttcagatacaccagtccacgattgcaatacaacttgtcagacacccaagggtgctataaacaccagcctcccatttcagaacatacatccgatcacaattggaaaatgtccaaaatatgtaaaaagcacaaaattgagactggccacaggattgaggaatgtcccgtccattcaatctagaggcctatttggggccattgccggtttcattgaaggggggtggacagggatggtagatggatggtacggttatcaccatcaaaatgagcaggggtcaggatatgcagccgacctgaagagcacacagaatgccattgacgagattactaacaaagtaaactctgttattgaaaaaatgaatacacagttcacagcagtaggtaaagagttcaaccacctggaaaaaagaatagagaatttaaataaaaaagttgatgatggtttcctggacatttggacttacaatgccgaactgttggttctattggaaaatgaaagaactttggactaccacgattcaaaggtgaagaacttatatgaaaaggtaagaagccagttaaaaaacaatgccaaggaaattggaaacggctgctttgaattttaccacaaatgtgataacacgtgcatggaaagtgtcaaaaatgggacttatgactacccaaaatactcagaggaagcaaaattaaacagagaagaaatagatggggtaaagctggaatcaacaaggatttaccagattttggcgatctattcaaccgtcgccagttcattggtactggtagtctccctgggggcaatcagtttctggatgtgctctaatgggtctctacagtgtagaatatgtatttaaggaagcggagccacgaacttctctctgttaaagcaagcaggagatgttgaagaaaaccccgggcctagcaaaagcaggggataattctattaaccatgaagactatcattgctttgagctacattctatgtctggttttcgctcaaaaacttcctggaaatgacaatagcactgcaacgctgtgccttgggcaccatgcagtaccaaacggaacgatagtgaaaacaatcacgaatgaccaaattgaagttactaatgctactgagctggttcagaattcctcaataggtgaaatatgcgacagtcctcatcagatccttgatggagaaaactgcacactaatagatgctctattgggagaccctcagtgtgatggctttcaaaataagaaatgggacctttttgttgaacgaagcaaagcctacagcaactgttacccttatgatgtgccggattatgcctcccttaggtcactagttgcctcatccggcacactggagtttaacaatgaaagcttcaattgggctggagtcactcaaaacggaacaagttctgcttgcataaggggatctaatagtagtttctttagtagattaaattggttgacccacttaaacttcaagtacccagcattgaacgtgactatgccaaacaatgaacaatttgacaaattgtacatttggggggttcaccacccgggtacggacaaggaccaaatcttcctgtatgctcaatcatcaggaagaatcacagtatctaccaaaagaagccaacaagctgtaatcccgaatatcggatctagacccagaataaggaatatccctagcagaataagcatctattggacaatagtaaaaccgggagacatacttttgattaacagcacagggaatctaattgctcctaggggttacttcaaaatacgaagtgggaaaagctcaataatgagatcagatgcacccattggcaaatgcaagtctgaatgcatcactccaaatggaagcattcccaatgacaaaccattccaaaatgtaaacaggatcacatacggggcctgtcccagatatgttaagcaaagcactctgaaattggcaacaggaatgcgaaatgtaccagagaaacaaactagaggcatatttggcgcaatagcgggtttcatagaaaatggttgggagggaatggtggatggttggtacggtttcaggcatcaaaattctgagggaagaggacaagcagcagatctcaaaagcactcaagcagcaatcgatcaaatcaatgggaagctgaatcgattgatcgggaaaaccaacgagaaattccatcagattgagaaagaattctcagaagtagaagggagaattcaggaccttgagaaatatgttgaggacacaaaaatagatctctggtcatacaacgcagagcttcttgttgccctggaaaaccaacatacaattgatctaactgactcagaaatgaacaaactgtttgaaaaaacaaagaagcaactgagggaaaatgctgaggatatgggcaatggttgtttcaaaatataccacaaatgtgacaatgcctgcataggatcaatcagaaatggaacttatgaccacgatgtatacagggatgaagcattaaacaaccggttccagatcaagggagttgagctgaagtcagggtacaaagattggatcctatggatttcctttgccatatcatgttttttgctttgtgttgctttgttggggttcatcatgtgggcctgccaaaagggcaacattaggtgcaacatttgcatttgagtgcattaattaaaaacacccttgtttctactggaagcggagccacgaacttctctctgttaaagcaagcaggagatgttgaagaaaaccccgggcctattttctaatatccacaaaatgaaggcaataattgtactactcatggtagtaacatccaatgcagatcgaatctgcactgggataacatcgtcaaactcaccacatgtcgtcaaaactgctactcaaggggaggtcaacgtgaccggtgtaataccactgacaacaacacccaccaaatctcattttgcaaatctcaaaggaacagaaaccagggggaaactatgcccaaaatgcctcaactgcacagatctggatgtagccttgggcagaccaaaatgcacagggaaaataccctctgcaagggtttcaatactccatgaagtcagacctgttacatctgggtgctttcctataatgcacgatagaacaaaaattagacagctgcctaaccttctccgaggatacgaacatgtcaggttatcaactcacaacgttatcaatgcaaaagatgcaccaggaagaccctacgaaattggaacctcagggtcttgccctaacattaccaatggaaacggattcttcgcaacaatggcttgggccgtcccaaaaaacaaaacagcaacaaatccattaacaatagaagtaccatacatttgtacagaaggagaagaccaaattaccgtttgggggttccactctgacaacgagacccaaatggcaaagctctatggggactcaaagccccagaagttcacctcatctgccaacggagtgaccacacattacgtttcacagattggtggcttcccaaatcaaacagaagacggaggactaccacaaagtggcagaattgttgttgattacatggtgcagaaatctggaaaaacaggaacaattacctatcaaagaggtattttattgcctcaaaaagtgtggtgcgcaagtggcaggagcaaggtaataaaaggatccttgcccttaattggagaagcagattgcctccatgaaaaatacggtggattaaacaaaagcaagccttactacacaggggaacatgcaaaggccataggaaattgcccaatatgggtgaaaacacccttgaagctggccaatggaaccaaatatagaccccctgcaaaactattaaaggaaagaggtttcttcggagccattgctggtttcttagagggaggatgggaaggaatgattgcaggttggcacggatacacatcccatggggcacatggagtagcggtggcagctgaccttaagagcactcaagaggccataaacaagataacaaaaaatctcaactctttgagtgagctggaagtaaagaatcttcaaagactaagcggtgccatggatgaactccacaacgaaatactagaactagatgagaaagtggatgatctcagagctgacacaataagctcacaaatagaactcgcagtcctgctttccaatgaaggaataataaacagtgaagatgaacatctcttggcgcttgaaagaaagctgaagaaaatgctgggcccctctgctgtagagatagggaatggatgctttgaaaccaaacacaagtgcaaccagacctgcctcgacagaatagctgctggtacctttgatgcaggagaattttctctccccacctttgattcactgaatattactgctgcatctttaaatgacgacggattggacaatcatactatactgctttactactcaactgctgcctccagtttggctgtaacactgatgatagctatctttgttgtttatatggtctccagagacaatgtttcttgctccatttgtctataaggaaagttaagccctgtattttcctttattgtagtgcttgtttgcttgttgtcattacaaagaaacgttattgaaaaattgatga

SEQ ID NO: 419 - DNA, 1710 bp, synthetic construct
  source 1..1710: mol_type = other DNA; note = Hybrid Vaccine Candidate 31
atgatgaaggcaatactagtagttctgctatatacatttgcaaccgcaaatgcagacacattatgtataggttatcatgcgaacaactcaacagacactgtagacacagtactagaaaagaatgtaacagtaacacactctgttaaccttctagaagacaagcataacgggaaactatgcaaactaagaggggtagccccattgcatttgggtaaatgtaacattgctggctggatcctgggaaatccagagtgtgaatcactctccacagcaagctcatggtcctacattgtggaaacatctagttcagacaatggaacgtgttacccaggagatttcatcgattatgaggagctaagagagcaattgagctcagtgtcatcatttgaaaggtttgagatattccccaagacaagttcatggcccaatcatgactcgaacaaaggtgtaacgacagcatgtcctcatgctggagcaaaaagcttctacaaaaatttaatatggctagttaaaaaaggaaattcatacccaaagctcagcaaatcctacattaatgataaagggaaagaagtcctcgtgctatggggcattcaccatccacctactagtgctgaccaacaaagtctctatcagaatgcagatgcatatgtttttgtggggacatcaagatacagcaagaagttcaagccggaaatagcaataaggcccaaagtgagggatcaagaagggagaatgaactattactggacactagtagagccgggagacaaaataacattcgaagcaactggaaatctagtggtaccgagatatgcattcgcaatggaaagaaatgctggatctggtattatcatttcagatacaccagtccacgattgcaatacaacttgtcagacacccaagggtgctataaacaccagcctcccatttcagaacatacatccgatcacaattggaaaatgtccaaaatatgtaaaaagcacaaaattgagactggccacaggattgaggaatgtcccgtccattcaatctagaggcctatttggggccattgccggtttcattgaaggggggtggacagggatggtagatggatggtacggttatcaccatcaaaatgagcaggggtcaggatatgcagccgacctgaagagcacacagaatgccattgacgagattactaacaaagtaaactctgttattgaaaaaatgaatacacagttcacagcagtaggtaaagagttcaaccacctggaaaaaagaatagagaatttaaataaaaaagttgatgatggtttcctggacatttggacttacaatgccgaactgttggttctattggaaaatgaaagaactttggactaccacgattcaaaggtgaagaacttatatgaaaaggtaagaagccagttaaaaaacaatgccaaggaaattggaaacggctgctttgaattttaccacaaatgtgataacacgtgcatggaaagtgtcaaaaatgggacttatgactacccaaaatactcagaggaagcaaaattaaacagagaagaaatagatggggtaaagctggaatcaacaaggatttaccagattttggcgatctattcaaccgtcgccagttcattggtactggtagtctccctgggggcaatcagtttctggatgtgctctaatgggtctctacagtgtagaatatgtatttaatgatga

SEQ ID NO: 420 - DNA, 1771 bp, synthetic construct
  source 1..1771: mol_type = other DNA; note = Hybrid Vaccine Candidate 32
atgagcaaaagcaggggataattctattaaccatgaagactatcattgctttgagctacattctatgtctggttttcgctcaaaaacttcctggaaatgacaatagcactgcaacgctgtgccttgggcaccatgcagtaccaaacggaacgatagtgaaaacaatcacgaatgaccaaattgaagttactaatgctactgagctggttcagaattcctcaataggtgaaatatgcgacagtcctcatcagatccttgatggagaaaactgcacactaatagatgctctattgggagaccctcagtgtgatggctttcaaaataagaaatgggacctttttgttgaacgaagcaaagcctacagcaactgttacccttatgatgtgccggattatgcctcccttaggtcactagttgcctcatccggcacactggagtttaacaatgaaagcttcaattgggctggagtcactcaaaacggaacaagttctgcttgcataaggggatctaatagtagtttctttagtagattaaattggttgacccacttaaacttcaagtacccagcattgaacgtgactatgccaaacaatgaacaatttgacaaattgtacatttggggggttcaccacccgggtacggacaaggaccaaatcttcctgtatgctcaatcatcaggaagaatcacagtatctaccaaaagaagccaacaagctgtaatcccgaatatcggatctagacccagaataaggaatatccctagcagaataagcatctattggacaatagtaaaaccgggagacatacttttgattaacagcacagggaatctaattgctcctaggggttacttcaaaatacgaagtgggaaaagctcaataatgagatcagatgcacccattggcaaatgcaagtctgaatgcatcactccaaatggaagcattcccaatgacaaaccattccaaaatgtaaacaggatcacatacggggcctgtcccagatatgttaagcaaagcactctgaaattggcaacaggaatgcgaaatgtaccagagaaacaaactagaggcatatttggcgcaatagcgggtttcatagaaaatggttgggagggaatggtggatggttggtacggtttcaggcatcaaaattctgagggaagaggacaagcagcagatctcaaaagcactcaagcagcaatcgatcaaatcaatgggaagctgaatcgattgatcgggaaaaccaacgagaaattccatcagattgagaaagaattctcagaagtagaagggagaattcaggaccttgagaaatatgttgaggacacaaaaatagatctctggtcatacaacgcagagcttcttgttgccctggaaaaccaacatacaattgatctaactgactcagaaatgaacaaactgtttgaaaaaacaaagaagcaactgagggaaaatgctgaggatatgggcaatggttgtttcaaaatataccacaaatgtgacaatgcctgcataggatcaatcagaaatggaacttatgaccacgatgtatacagggatgaagcattaaacaaccggttccagatcaagggagttgagctgaagtcagggtacaaagattggatcctatggatttcctttgccatatcatgttttttgctttgtgttgctttgttggggttcatcatgtgggcctgccaaaagggcaacattaggtgcaacatttgcatttgagtgcattaattaaaaacacccttgtttctacttgatga

SEQ ID NO: 421 - DNA, 1856 bp, synthetic construct
  source 1..1856: mol_type = other DNA; note = Hybrid Vaccine Candidate 33
atgattttctaatatccacaaaatgaaggcaataattgtactactcatggtagtaacatccaatgcagatcgaatctgcactgggataacatcgtcaaactcaccacatgtcgtcaaaactgctactcaaggggaggtcaacgtgaccggtgtaataccactgacaacaacacccaccaaatctcattttgcaaatctcaaaggaacagaaaccagggggaaactatgcccaaaatgcctcaactgcacagatctggatgtagccttgggcagaccaaaatgcacagggaaaataccctctgcaagggtttcaatactccatgaagtcagacctgttacatctgggtgctttcctataatgcacgatagaacaaaaattagacagctgcctaaccttctccgaggatacgaacatgtcaggttatcaactcacaacgttatcaatgcaaaagatgcaccaggaagaccctacgaaattggaacctcagggtcttgccctaacattaccaatggaaacggattcttcgcaacaatggcttgggccgtcccaaaaaacaaaacagcaacaaatccattaacaatagaagtaccatacatttgtacagaaggagaagaccaaattaccgtttgggggttccactctgacaacgagacccaaatggcaaagctctatggggactcaaagccccagaagttcacctcatctgccaacggagtgaccacacattacgtttcacagattggtggcttcccaaatcaaacagaagacggaggactaccacaaagtggcagaattgttgttgattacatggtgcagaaatctggaaaaacaggaacaattacctatcaaagaggtattttattgcctcaaaaagtgtggtgcgcaagtggcaggagcaaggtaataaaaggatccttgcccttaattggagaagcagattgcctccatgaaaaatacggtggattaaacaaaagcaagccttactacacaggggaacatgcaaaggccataggaaattgcccaatatgggtgaaaacacccttgaagctggccaatggaaccaaatatagaccccctgcaaaactattaaaggaaagaggtttcttcggagccattgctggtttcttagagggaggatgggaaggaatgattgcaggttggcacggatacacatcccatggggcacatggagtagcggtggcagctgaccttaagagcactcaagaggccataaacaagataacaaaaaatctcaactctttgagtgagctggaagtaaagaatcttcaaagactaagcggtgccatggatgaactccacaacgaaatactagaactagatgagaaagtggatgatctcagagctgacacaataagctcacaaatagaactcgcagtcctgctttccaatgaaggaataataaacagtgaagatgaacatctcttggcgcttgaaagaaagctgaagaaaatgctgggcccctctgctgtagagatagggaatggatgctttgaaaccaaacacaagtgcaaccagacctgcctcgacagaatagctgctggtacctttgatgcaggagaattttctctccccacctttgattcactgaatattactgctgcatctttaaatgacgacggattggacaatcatactatactgctttactactcaactgctgcctccagtttggctgtaacactgatgatagctatctttgttgtttatatggtctccagagacaatgtttcttgctccatttgtctataaggaaagttaagccctgtattttcctttattgtagtgcttgtttgcttgttgtcattacaaagaaacgttattgaaaaattgatga

SEQ ID NO: 422 - DNA, 39 bp, synthetic construct; identical to SEQ ID NO: 175
  source 1..39: mol_type = other DNA

SEQ ID NO: 423 - DNA, 12 bp, synthetic construct
  source 1..12: mol_type = other DNA
cagcaggcccag
